(19) United States
(12) Patent Application Publication
(10) Pub. No.: US 2004/0259215 A1
(43) Pub. Date: Dec. 23, 2004

(54) Genes coding for dna replication and for proteins related to pathogenesis

(76) Inventors: Oskar Zelder, Speyer (DE); Markus Pompejus, Freinsheim (DE); Hartwig Schroder, Nussloch (DE); Burkhard Kroger, Limburgerhof (DE); Corina Klopprogge, Ludwigshafen (DE); Gregor Haberhauer, Limburgerhof (DE)

Correspondence Address: LAHIVE & COCKFIELD, LLP., 28 STATE STREET, BOSTON, MA, 02109, US

(21) Appl. No.: 10/494,674

(22) PCT Filed: Oct. 31, 2002
(86) PCT No.: PCT/EP02/12132

(30) Foreign Application Priority Data
Nov. 5, 2001 (DE) 101 54 246.1

(51) Int. Cl. C12P 13/04; C12P 13/08; C12N 15/74; C07H 21/04

(52) U.S. Cl. 435/106; 435/252.3; 536/23.2; 435/471; 435/115

(57) ABSTRACT

The invention relates to novel nucleic acid molecules, to the use thereof for constructing genetically improved microorganisms and to methods for preparing fine chemicals, in particular amino acids, with the aid of said genetically improved microorganisms.

### BACKGROUND OF THE INVENTION

[0001] Particular products and byproducts of naturally occurring metabolic processes in cells are used in many branches of industry, including the food industry, the animal feed industry, the cosmetics industry and the pharmaceutical industry. These molecules which are collectively referred to as “fine chemicals” comprise organic acids, both proteinogenic and nonproteinogenic amino acids, nucleotides and nucleosides, lipids and fatty acids, diols, carbohydrates, aromatic compounds, vitamins, cofactors and enzymes. They are best produced by means of cultivating, on a large scale, bacteria which have been developed to produce and secrete large amounts of the molecule desired in each particular case. An organism which is particularly suitable for this purpose is Corynebacterium glutamicum, a Gram-positive nonpathogenic bacterium. Using strain selection, a number of mutant strains have been developed which produce various desirable compounds. The selection of strains which are improved with respect to the production of a particular molecule is, however, a time-consuming and difficult process.

### BRIEF DESCRIPTION OF THE INVENTION

[0002] The present invention provides novel nucleic acid molecules which can be used for identifying or classifying Corynebacterium glutamicum or related bacterial species. C. glutamicum is a Gram-positive, aerobic bacterium which is widely used in industry for the large-scale production of a number of fine chemicals and also for the degradation of hydrocarbons (for example in the case of crude oil spills) and for the oxidation of terpenoids. The nucleic acid molecules may therefore be used for identifying microorganisms which can be used for producing fine chemicals, for example by fermentation processes. Although C. glutamicum itself is nonpathogenic, it is, however, related to other Corynebacterium species such as Corynebacterium diphteriae (the diphtheria pathogen), which are major pathogens in humans. The ability to identify the presence of Corynebacterium species may therefore also be of significant clinical importance, for example in diagnostic applications. Moreover, said nucleic acid molecules may serve as reference points for mapping the C. glutamicum genome or genomes of related organisms.

[0003] These novel nucleic acid molecules encode proteins which are referred to herein as DNA-replication, ribosomal and pathogenesis (RRP) proteins. These RRP proteins, for example, may be involved directly or indirectly in the production of one or more fine chemicals in C. glutamicum. The RRP proteins of the invention may also be involved in the degradation of hydrocarbons or in the oxidation of terpenoids. These proteins can be used for identifying Corynebacterium glutamicum or organisms related to C. glutamicum; the presence of an RRP protein specific for C. glutamicum and related species in a protein mixture may indicate the presence of any of said bacteria in the sample. Furthermore, said RRP proteins may have homologs in plants or animals, which are involved in a diseased state or an illness; thus, said proteins may serve as useful pharmaceutical targets for drug screening and for the development of therapeutic compounds.

[0004] Owing to the availability of cloning vectors for use in Corynebacterium glutamicum, as disclosed, for example in Sinskey et al., U.S. Pat. No. 4,649,119, and of techniques for the genetic manipulation of C. glutamicum and the related Brevibacterium species (e.g. lactofermentum) (Yoshihama et al., J. Bacteriol. 162: 591-597 (1985); Katsumata et al., J. Bacteriol. 159: 306-311 (1984); and Santamaria et al. J. Gen. Microbiol. 130: 2237-2246 (1984)), the nucleic acid molecules of the invention can be used for genetic manipulation of said organism in order to modulate the production of one or more fine chemicals. This modulation may take place due to a direct effect of the manipulation of a gene of the invention or due to an indirect effect of such a manipulation. For example, it is possible, by modifying the activity of a protein which is involved in the biosynthesis or degradation of a fine chemical (i.e. by mutagenesis of the corresponding gene), to directly modulate the ability of the cell to synthesize or degrade said compound, thereby modulating the yield and/or efficiency of production of said fine chemical. Likewise, it is possible, by modulating the activity of a protein which regulates a metabolic pathway of a fine chemical, to have a direct influence on whether production of the compound of interest is up- or downregulated, with both of these processes modulating the yield or efficiency of production of the fine chemical from the cell.

[0005] Modification of the activity of a protein of the invention (i.e. mutagenesis of the corresponding gene) may also modulate indirectly the production of fine chemicals so that the ability of the cell to grow and to divide or to remain viable and productive is increased overall. Fine chemicals are usually produced from C. glutamicum by a large-scale fermentative culture of these microorganisms under conditions which frequently are suboptimal for growth and cell division. It may be possible, by modifying a protein of the invention (e.g. a stress reaction protein, a cell wall protein or a protein involved in the metabolism of compounds required for cell division and cell growth to take place, such as nucleotides and amino acids) so that better survival, growth and propagation is possible under said conditions, to increase the number and productivity of these modified C. glutamicum cells in large-scale cultures, and this should in turn lead to increased yields and/or increased efficiency of production of one or more fine chemicals of interest. Furthermore, the metabolic pathways of a cell are necessarily dependent on one another and coregulated. It is possible, by changing the activity of any metabolic pathway in C. glutamicum (i.e. by changing the activity of any of the proteins of the invention, which are involved in such a pathway), to change simultaneously the activity or regulation of another metabolic pathway in said microorganism, which may be involved directly in the synthesis or degradation of a fine chemical.

[0006] There is a number of mechanisms by which modification of an RRP protein of the invention influences the yield, production or productivity of a fine chemical in a C. glutamicum strain containing such a modified RRP protein. For example, it is possible, by accelerating the rate of DNA replication (for example by optimizing the activity of one or more DNA polymerases or by increasing the rate at which a topoisomerase or helicase unwinds the DNA), to accelerate cell division, and this in turn increases the number of living fine chemical-producing cells in a culture. In a similar way, it is possible, by increasing the rate of translation (e.g. by optimizing the activity of ribosomal proteins), to increase the number of proteins in a cell, which are involved in the synthesis of one or more fine chemicals of interest. Both measures should lead to an increase in the production of the fine chemical of interest when culturing microorganisms having appropriately modified RRP proteins.

[0007] Modifications in the DNA replication proteins of the invention may also lead to greater replication accuracy and thereby increase the genetic stability and viability of said microorganisms and thereby reduce the risk of destroying a further genetic modification which increases production of said fine chemical, due to incorrect replication.

[0008] The present invention provides novel nucleic acid molecules encoding proteins which are referred to herein as RRP proteins and which, for example, can modulate the production or efficiency of production of one or more fine chemicals in C. glutamicum or serve as identification markers for C. glutamicum or related organisms. Nucleic acid molecules encoding an RRP protein are referred to herein as RRP nucleic acid molecules. In a preferred embodiment, the RRP protein can modulate the production or efficiency of production of one or more fine chemicals in C. glutamicum or serve as identification marker for C. glutamicum or related organisms. Examples of such proteins are those encoded by the genes listed in Table 1.

[0009] Consequently, one aspect of the invention relates to isolated nucleic acid molecules (e.g. cDNAs) comprising a nucleotide sequence which encodes an RRP protein or biologically active sections thereof and also nucleic acid fragments which are suitable as primers or hybridization probes for detecting or amplifying RRP-encoding nucleic acid (e.g. DNA or mRNA). In particularly preferred embodiments, the isolated nucleic acid molecule comprises any of the nucleotide sequences listed in Appendix A or the coding region or a complement thereof of any of these nucleotide sequences. In other preferred embodiments, the isolated nucleic acid molecule encodes any of the amino acid sequences listed in Appendix B. The preferred RRP proteins of the invention likewise have preferably at least one of the RRP activities described herein.

[0010] Appendix A defines hereinbelow the nucleic acid sequences of the sequence listing together with the sequence modifications at the relevant position, described in Table 1.

[0011] Appendix B defines hereinbelow the polypeptide sequences of the sequence listing together with the sequence modifications at the relevant position, described in Table 1.

[0012] In a further embodiment, the isolated nucleic acid molecule is at least 15 nucleotides in length and hybridizes under stringent conditions to a nucleic acid molecule which comprises a nucleotide sequence of Appendix A. The isolated nucleic acid molecule preferably corresponds to a naturally occurring nucleic acid molecule. The isolated nucleic acid more preferably encodes a naturally occurring C. glutamicum RRP protein or a biologically active section thereof.

[0013] A further aspect of the invention relates to vectors, for example recombinant expression vectors, which contain the nucleic acid molecules of the invention and to host cells into which said vectors have been introduced. In one embodiment, an RRP protein is prepared by using this host cell which is cultivated in a suitable medium. The RRP protein may then be isolated from the medium or the host cell.

[0014] A further aspect of the invention relates to a genetically modified microorganism into which an RRP gene has been introduced or in which an RRP gene has been modified. In one embodiment, the genome of said microorganism has been modified by introducing at least one inventive nucleic acid molecule which encodes the mutated RRP sequence as transgene. In another embodiment, an endogenous RRP gene in the genome of said microorganism has been modified, for example, functionally disrupted, by homologous recombination with a modified RRP gene. In a preferred embodiment, the microorganism belongs to the genus Corynebacterium or Brevibacterium, with Corynebacterium glutamicum being particularly preferred. In a preferred embodiment, the microorganism is also used for preparing a compound of interest, such as an amino acid, particularly preferably lysine.

[0015] Another preferred embodiment are host cells having more than one of the nucleic acid molecules described in Appendix A. Such host cells can be prepared in various ways known to the skilled worker. They may be transfected, for example, by vectors carrying several of the nucleic acid molecules of the invention. However, it is also possible to use a vector for introducing in each case one nucleic acid molecule of the invention into the host cell and therefore to use a plurality of vectors either simultaneously or sequentially. Thus it is possible to construct host cells which carry numerous, up to several hundred, nucleic acid sequences of the invention. Such an accumulation can often produce superadditive effects on the host cell with respect to fine-chemical productivity.

[0016] A further aspect of the invention relates to an isolated RRP protein or a section thereof, for example a biologically active section. In a preferred embodiment, the isolated RRP protein or its section may modulate the production or efficiency of production of one or more fine chemicals in C. glutamicum or serve as identification marker for C. glutamicum or related organisms. In another preferred embodiment, the isolated RRP protein or a section thereof is sufficiently homologous to an amino acid sequence of Appendix B so that the protein or its section retains the ability, for example, to modulate the production or efficiency of production of one or more fine chemicals in C. glutamicum or to serve as identification marker for C. glutamicum or related organisms.

[0017] Moreover, the invention relates to an isolated RRP protein preparation. In preferred embodiments, the RRP protein comprises an amino acid sequence of Appendix B. In a further preferred embodiment, the invention relates to an isolated full-length protein which is essentially homologous to a complete amino acid sequence of Appendix B (which is encoded by an open reading frame in Appendix A).

[0018] The RRP polypeptide or a biologically active section thereof may be functionally linked to a non-RRP polypeptide in order to produce a fusion protein. In preferred embodiments, this fusion protein has a different activity from that of the RRP protein alone. In other preferred embodiments, said fusion protein can modulate the yield, production and/or efficiency of production of one or more fine chemicals in C. glutamicum or serve as identification marker for C. glutamicum or related organisms. In particularly preferred embodiments, integration of said fusion protein into a host cell modulates the production of a compound of interest by the cell.

[0019] A further aspect of the invention relates to a method for preparing a fine chemical. The method provides for the cultivation of a cell containing a vector which causes expression of an RRP nucleic acid molecule of the invention so that a fine chemical is produced. In a preferred embodiment, this method moreover comprises the step of obtaining a cell containing such a vector, said cell being transfected with a vector which causes expression of an RRP nucleic acid. In a further preferred embodiment, said method moreover comprises the step in which the fine chemical is obtained from the culture. In a preferred embodiment, the cell belongs to the genus Corynebacterium or Brevibacterium.

[0020] A further aspect of the invention relates to methods for modulating the production of a molecule from a microorganism. These methods comprise contacting the cell with a substance which modulates RRP-protein activity or RRP nucleic-acid expression such that a cell-associated activity is modified in comparison with the same activity in the absence of said substance. In a preferred embodiment, the cell is modulated with regard to one or more C. glutamicum RRP protein activities so as to improve the yield, production and/or efficiency of production of a fine chemical of interest by this microorganism. The substance which modulates RRP protein activity can be a substance which stimulates, for example, RRP-protein activity or RRP nucleic-acid expression. Examples of substances stimulating RRP protein activity or RRP nucleic-acid expression include small molecules, active RRP proteins and nucleic acids which encode RRP proteins and have been introduced into the cell. Examples of substances which inhibit RRP activity or RRP expression include small molecules and RRP antisense nucleic acid molecules.

[0021] A further aspect of the invention relates to methods for modulating the yields, the production and/or the efficiency of production of a compound of interest from a cell, comprising introducing an RRP wild-type gene or RRP-mutant gene into a cell, which gene either remains on a separate plasmid or is integrated into the genome of the host cell. Integration into the genome may take place randomly or via homologous recombination so that the native gene is replaced by the integrated copy, leading to the production of the compound of interest from the cell to be modulated. In a preferred embodiment, said yields are increased. In a further preferred embodiment, the chemical is a fine chemical which, in a particularly preferred embodiment, is an amino acid. In a particularly preferred embodiment, this amino acid is L-lysine.

### DETAILED DESCRIPTION OF THE INVENTION

[0022] The present invention provides RRP-nucleic acid and RRP-protein molecules which may be used for identifying Corynebacterium glutamicum or related organisms, for mapping the C. glutamicum genome (or the genome of a closely related organism) or for identifying microorganisms which may be used for producing fine chemicals, for example by fermentative processes. The proteins encoded by said nucleic acids may be used for directly or indirectly modulating the production or efficiency of production of one or more fine chemicals in C. glutamicum, as identification markers for C. glutamicum or related organisms, for oxidizing terpenoids or for degrading hydrocarbons or as targets for developing therapeutic pharmaceutical compounds. The aspects of the invention are further illustrated below.

[0023] I. Fine Chemicals

[0024] The term “fine chemicals” is known in the art and includes molecules which are produced by an organism and are used in various branches of industry such as, for example, but not restricted to, the pharmaceutical industry, the agricultural industry and the cosmetics industry. These compounds comprise organic acids such as tartaric acid, itaconic acid and diaminopimelic acid, both proteinogenic and nonproteinogenic amino acids, purine and pyrimidine bases, nucleosides and nucleotides (as described, for example, in Kuninaka, A. (1996) Nucleotides and related compounds, pp. 561-612, in Biotechnology Vol. 6, Rehm et al., Editors VCH: Weinheim and the references therein), lipids, saturated and unsaturated fatty acids (e.g. arachidonic acid), diols (e.g. propanediol and butanediol), carbohydrates (e.g. hyaluronic acid and trehalose), aromatic compounds (e.g. aromatic amines, vanilline and indigo), vitamins and cofactors (as described in Ullmann's Encyclopedia of Industrial Chemistry, Vol. A27, “Vitamins”, pp. 443-613(1996) VCH: Weinheim and the references therein; and Ong, A. S., Niki, E. and Packer, L. (1995) “Nutrition, Lipids, Health and Disease” Proceedings of the UNESCO/Confederation of Scientific and Technological Associations in Malaysia and the Society for Free Radical Research—Asia, held Sep. 1-3, 1994 in Penang, Malaysia, AOCS Press (.1995)), enzymes and all other chemicals described by Gutcho (1983) in Chemicals by Fermentation, Noyes Data Corporation, ISBN: 0818805086 and the references indicated therein. The metabolism and the uses of particular fine chemicals are further illustrated below.

[0025] A. Amino Acid Metabolism and Uses

[0026] Amino acids comprise the fundamental structural units of all proteins and are thus essential for normal functions in all organisms. The term “amino acid” is known in the art. Proteinogenic amino acids, of which there are 20 types, serve as structural units for proteins, in which they are linked together by peptide bonds, whereas the nonproteinogenic amino acids (hundreds of which are known) usually do not occur in proteins (see Ullmann's Encyclopedia of Industrial Chemistry, Vol. A2, pp. 57-97 VCH: Weinheim (1985)). Amino acids can exist in the optical D or L configuration, although L-amino acids are usually the only type found in naturally occurring proteins. Biosynthetic and degradation pathways of each of the 20 proteinogenic amino acids are well characterized both in prokaryotic and eukaryotic cells (see, for example, Stryer, L., Biochemistry, 3^{rd} edition, pp. 578-590 (1988)). The “essential” amino acids (histidine, isoleucine, leucine, lysine, methionine, phenylalanine, threonine, tryptophan and valine), so called because, owing to the complexity of their biosyntheses, they must usually be taken in with the diet, are converted by simple biosynthetic pathways into the other 11 “nonessential” amino acids (alanine, arginine, asparagine, aspartate, cysteine, glutamate, glutamine, glycine, proline, serine and tyrosine). Higher animals are able to synthesize some of these amino acids but the essential amino acids must be taken in with the food in order that normal protein synthesis takes place.

[0027] Apart from their function in protein biosynthesis, these amino acids are interesting chemicals as such, and it has been found that many have various applications in the human food, animal feed, chemicals, cosmetics, agricultural and pharmaceutical industries. Lysine is an important amino acid not only for human nutrition but also for monogastric livestock such as poultry and pigs. Glutamate is most frequently used as flavor additive (monosodium glutamate, MSG) and elsewhere in the food industry, as are aspartate, phenylalanine, glycine and cysteine. Glycine, L-methionine and tryptophan are all used in the pharmaceutical industry. Glutamine, valine, leucine, isoleucine, histidine, arginine, proline, serine and alanine are used in the pharmaceutical industry and the cosmetics industry. Threonine, tryptophan and D/L-methionine are widely used animal feed additives (Leuchtenberger, W. (1996) Amino acids—technical production and use, pp. 466-502 in Rehm et al., (editors) Biotechnology Vol. 6, Chapter 14a, VCH: Weinheim). It has been found that these amino acids are additionally suitable as precursors for synthesizing synthetic amino acids and proteins, such as N-acetylcysteine, S-carboxymethyl-L-cysteine, (S)-5-hydroxytryptophan and other substances described in Ullmann's Encyclopedia of Industrial Chemistry, Vol. A2, pp. 57-97, VCH, Weinheim, 1985.

[0028] The biosynthesis of these natural amino acids in organisms able to produce them, for example bacteria, has been well characterized (for a review of bacterial amino acid biosynthesis and its regulation see Umbarger, H. E. (1978) Ann. Rev. Biochem. 47: 533-606). Glutamate is synthesized by reductive amination of α-ketoglutarate, an intermediate product in the citric acid cycle. Glutamine, proline and arginine are each generated successively from glutamate. The biosynthesis of serine takes place in a three-step process, starts with 3-phosphoglycerate (an intermediate product of glycolysis) and affords this amino acid after oxidation, transamination and hydrolysis steps. Cysteine and glycine are each produced from serine, specifically the former by condensation of homocysteine with serine, and the latter by transfer of the side-chain β-carbon atom to tetrahydrofolate in a reaction catalyzed by serine transhydroxy-methylase. Phenylalanine and tyrosine are synthesized from the precursors of the glycolysis and pentose phosphate pathway, and erythrose 4-phosphate and phosphoenolpyruvate, in a 9-step biosynthetic pathway which diverges only in the last two steps after the synthesis of prephenate. Tryptophan is likewise produced from these two starting molecules but it is synthesized by an 11-step pathway. Tyrosine can also be prepared from phenylalanine in a reaction catalyzed by phenylalanine hydroxylase. Alanine, valine and leucine are each biosynthetic products derived from pyruvate, the final product of glycolysis. Aspartate is formed from oxalacetate, an intermediate product of the citrate cycle. Asparagine, methionine, threonine and lysine are each produced by the conversion of aspartate. Isoleucine is formed from threonine. Histidine is formed from 5-phosphoribosyl 1-pyrophosphate, an activated sugar, in a complex 9-step pathway.

[0029] Amounts of amino acids exceeding those required for protein biosynthesis cannot be stored and are instead broken down so that intermediate products are provided for the principal metabolic pathways in the cell (for a review, see Stryer, L., Biochemistry, 3^{rd} edition, Chapter 21 “Amino Acid Degradation and the Urea Cycle”; pp. 495-516 (1988)). Although the cell is able to convert unwanted amino acids into the useful intermediate products of metabolism, production of amino acids is costly in terms of energy, the precursor molecules and the enzymes necessary for their synthesis. It is therefore not surprising that amino acid biosynthesis is regulated by feedback inhibition, whereby the presence of a particular amino acid slows down or completely stops its own production (for a review of feedback mechanisms in amino acid biosynthetic pathways, see Stryer, L., Biochemistry, 3^{rd} edition, Chapter 24, “Biosynthesis of Amino Acids and Heme”, pp. 575-600 (1988)). The output of a particular amino acid is therefore restricted by the amount of this amino acid in the cell.

[0030] B. Metabolism and Uses of Vitamins, Cofactors and Nutraceuticals

[0031] Vitamins, cofactors and nutraceuticals comprise another group of molecules. Higher animals have lost the ability to synthesize them and therefore have to take them in, although they are easily synthesized by other organisms such as bacteria. These molecules are either bioactive molecules per se or precursors of bioactive substances which serve as electron transfer molecules or intermediate products in a number of metabolic pathways. Besides their nutritional value, these compounds also have a significant industrial value as colorants, antioxidants and catalysts or other processing auxiliaries. (For a review of the structure, activity and industrial applications of these compounds, see, for example, Ullmann's Encyclopedia of Industrial Chemistry, “Vitamins”, Vol. A27, pp. 443-613, VCH: Weinheim, 1996). The term “vitamin” is known in the art and comprises nutrients which are required for normal functional of an organism but cannot be synthesized by this organism itself. The group of vitamins may include cofactors and nutraceutical compounds. The term “cofactor” comprises nonproteinaceous compounds necessary for the appearance of a normal enzymic activity. These compounds may be organic or inorganic; the cofactor molecules of the invention are preferably organic. The term “nutraceutical” comprises food additives which are health-promoting in plants and animals, especially humans. Examples of such molecules are vitamins, antioxidants and likewise certain lipids (e.g. polyunsaturated fatty acids).

[0032] The biosynthesis of these molecules in organisms able to produce them, such as bacteria, has been comprehensively characterized (Ullmann's Encyclopedia of Industrial Chemistry, “Vitamins”, Vol. A27, pp. 443-613, VCH: Weinheim, 1996, Michal, G. (1999) Biochemical Pathways: An Atlas of Biochemistry and Molecular Biology, John Wiley & Sons; Ong, A. S., Niki, E. and Packer, L. (1995) “Nutrition, Lipids, Health and Disease” Proceedings of the UNESCO/Confederation of Scientific and Technological Associations in Malaysia and the Society for free Radical Research—Asia, held on Sep. 1-3, 1994, in Penang, Malaysia, AOCS Press, Champaign, IL X, 374 S).

[0033] Thiamine (vitamin B₁) is formed by chemical coupling of pyrimidine and thiazole units. Riboflavin (vitamin B₂) is synthesized from guanosine 5′-triphosphate (GTP) and ribose 5′-phosphate. Riboflavin in turn is employed for the synthesis of flavin mononucleotide (FMN) and flavin adenine dinucleotide (FAD). The family of compounds together referred to as “vitamin B6” (for example pyridoxine, pyridoxamine, pyridoxal 5′-phosphate and the commercially used pyridoxine hydrochloride), are all derivatives of the common structural unit 5-hydroxy-6-methylpyridine. Panthothenate (pantothenic acid, R-(+)-N-(2,4-dihydroxy-3,3-dimethyl-1-oxobutyl)-β-alanine) can be prepared either by chemical synthesis or by fermentation. The last steps in pantothenate biosynthesis consist of ATP-driven condensation of β-alanine and pantoic acid. The enzymes responsible for the biosynthetic steps for the conversion into pantoic acid and into β-alanine and for the condensation to pantothenic acid are known. The metabolically active form of pantothenate is coenzyme A whose biosynthesis takes place by 5 enzymatic steps. Pantothenate, pyridoxal 5′-phosphate, cysteine and ATP are the precursors of coenzyme A. These enzymes catalyze not only the formation of pantothenate but also the production of (R)-pantoic acid, (R)-pantolactone, (R)-panthenol (provitamin B₅), pantetheine (and its derivatives) and coenzyme A.

[0034] The biosynthesis of biotin from the precursor molecule pimeloyl-CoA in microorganisms has been investigated in detail, and several of the genes involved have been identified. It has emerged that many of the corresponding proteins are involved in the Fe cluster synthesis and belong to the class of nifS proteins. Liponic acid is derived from octanoic acid and serves as coenzyme in energy metabolism where it is a constituent of the pyruvate dehydrogenase complex and of the α-ketoglutarate dehydrogenase complex. Folates are a group of substances all derived from folic acid which in turn is derived from L-glutamic acid, p-aminobenzoic acid and 6-methylpterin. The biosynthesis of folic acid and its derivatives starting from the intermediate products of the biotransformation of guanosine 5′-triphosphate (GTP), L-glutamic acid and p-aminobenzoic acid has been investigated in detail in certain microorganisms.

[0035] Corrinoids (such as the cobalamines and, in particular, vitamin B₁₂) and the porphyrins belong to a group of chemicals distinguished by a tetrapyrrole ring system. The biosynthesis of vitamin B₁₂ is so complex that it has not yet been completely characterized, but many of the enzymes and substrates involved are now known. Nicotinic acid (nicotinate) and nicotinamide are pyridine derivatives which are also referred to as “niacin”. Niacin is the precursor of the important coenzymes NAD (nicotinamide adenine dinucleotide) and NADP (nicotinamide adenine dinucleotide phosphate) and their reduced forms.

[0036] Production of these compounds on the industrial scale is mostly based on cell-free chemical syntheses, although some of these chemicals, such as riboflavin, vitamin B₆, pantothenate and biotin, have also been produced by large-scale cultivation of microorganisms. Only vitamin B₁₂ is, because of the complexity of its synthesis, produced only by fermentation. In vitro processes require a considerable expenditure of materials and time and frequently high costs.

[0037] C. Purine, Pyrimidine, Nucleoside and Nucleotide Metabolism and Uses

[0038] Genes for purine and pyrimidine metabolism and their corresponding proteins are important aims for the therapy of oncoses and viral infections. The term “purine” or “pyrimidine” comprises nitrogen-containing bases which form part of nucleic acids, coenzymes and nucleotides. The term “nucleotide” encompasses the fundamental structural units of nucleic acid molecules, which comprise a nitrogen-containing base, a pentose sugar (the sugar is ribose in the case of RNA and the sugar is D-deoxyribose in the case of DNA) and phosphoric acid. The term “nucleoside” comprises molecules which serve as precursors of nucleotides but have, in contrast to the nucleotides, no phosphoric acid unit. It is possible to inhibit RNA and DNA synthesis by inhibiting the biosynthesis of these molecules or their mobilization to form nucleic acid molecules; targeted inhibition of this activity in cancer cells allows the ability of tumor cells to divide and replicate to be inhibited. There are also nucleotides which do not form nucleic acid molecules but serve as energy stores (i.e. AMP) or as coenzymes (i.e. FAD and NAD).

[0039] Several publications have described the use of these chemicals for these medical indications, the purine and/or pyrimidine metabolism being influenced (for example Christopherson, R. I. and Lyons, S. D. (1990) “Potent inhibitors of de novo pyrimidine and purine biosynthesis as chemotherapeutic agents”, Med. Res. Reviews 10: 505-548). Investigations of enzymes involved in purine and pyrimidine metabolism have concentrated on the development of novel medicaments which can be used, for example, as immunosuppressants or antiproliferative agents (Smith, J. L. (1995) “Enzymes in Nucleotide Synthesis” Curr. Opin. Struct. Biol. 5: 752-757; Simmonds, H. A. (1995) Biochem. Soc. Transact. 23: 877-902). However, purine and pyrimidine bases, nucleosides and nucleotides also have other possible uses: as intermediate products in the biosynthesis of various fine chemicals (e.g. thiamine, S-adenosylmethionine, folates or riboflavin), as energy carriers for the cell (for example ATP or GTP) and for chemicals themselves, which are ordinarily used as flavor enhancers (for example IMP or GMP) or for many medical applications (see, for example, Kuninaka, A., (1996) “Nucleotides and Related Compounds in Biotechnology” Vol. 6, Rehm et al., editors VCH: Weinheim, pp. 561-612). Enzymes involved in purine, pyrimidine, nucleoside or nucleotide metabolism are also increasingly serving as targets against which chemicals are being developed for crop protection, including fungicides, herbicides and insecticides.

[0040] The metabolism of these compounds in bacteria has been characterized (for reviews, see, for example, Zalkin, H. and Dixon, J. E. (1992) “De novo purine nucleotide biosynthesis” in Progress in Nucleic Acids Research and Molecular biology, Vol. 42, Academic Press, pp. 259-287; and Michal, G. (1999) “Nucleotides and Nucleosides”; Chapter 8 in : Biochemical Pathways: An Atlas of Biochemistry and Molecular Biology, Wiley, N.Y.). Purine metabolism, the object of intensive research, is essential for normal functioning of the cell. Disordered purine metabolism in higher animals may cause severe illnesses, for example gout. Purine nucleotides are synthesized from ribose 5-phosphate by a number of steps via the intermediate compound inosine 5′-phosphate (IMP), leading to the production of guanosine 5′-monophosphate (GMP) or adenosine 5′-monophosphate (AMP), from which the triphosphate forms used as nucleotides can easily be prepared. These compounds are also used as energy stores, so that breakdown thereof provides energy for many different biochemical processes in the cell. Pyrimidine biosynthesis takes place via formation of uridine 5′-mono-phosphate (UMP) from ribose 5-phosphate. UMP in turn is converted into cytidine 5′-triphosphate (CTP). The deoxy forms of all nucleotides are prepared in a one-step reduction reaction from the diphosphate ribose form of the nucleotide to give the diphosphate deoxyribose form of the nucleotide. After phosphorylation, these molecules can take part in DNA synthesis.

[0041] D. Trehalose Metabolism and Uses

[0042] Trehalose consists of two glucose molecules linked together by an α,α-1,1 linkage. It is ordinarily used in the food industry as sweetener, as additive for dried or frozen foods and in beverages. However, it is also used in the pharmaceutical industry or in the cosmetics industry and biotechnology industry (see, for example, Nishimoto et al., (1998) U.S. Pat. No. 5,759,610; Singer, M. A. and Lindquist, S. (1998) Trends Biotech. 16: 460-467; Paiva, C. L. A. and Panek, A. D. (1996) Biotech Ann. Rev. 2: 293-314; and Shiosaka, M. (1997) J. Japan 172: 97-102). Trehalose is produced by enzymes of many microorganisms and is naturally released into the surrounding medium from which it can be isolated by methods known in the art.

[0043] II. Activity of the Genes of the Invention

[0044] At least three activities are required for a particular bacterial species to survive in an environment. Firstly, the cell must be able to divide efficiently for at least to maintain or to increase the cell population. Secondly, the cell must efficiently express those genes which encode proteins required for normal cellular functions. Finally, the cell must be capable of interacting with its environment, either by adapting to the prevailing environmental conditions or by physical locomotion in preferred environments or by acting directly on the environment in a manner so as to improve its survivability. The critical steps involved in any of these activities include replication of the bacterial genome, ribosomal activity in protein biosynthesis and anticellular or cell lysis activities (as they are involved in the pathogenesis of an organism).

[0045] III. Elements and Methods of the Invention

[0046] The present invention is based, at least partially, on the detection of new molecules which are referred to herein as RRP nucleic-acid molecules. These RRP nucleic acid molecules are suitable not only for identifying C. glutamicum or related bacterial species but also as markers for mapping the C. glutamicum genome and for identifying bacteria suitable for producing fine chemicals by, for example, fermentative processes. The present invention is based, at least partially, also on those RRP-protein molecules which are encoded by said RRP nucleic acid molecules. These RRP molecules may modulate the yield, production and/or efficiency of production of one or more fine chemicals in C. glutamicum, serve as identification markers for C. glutamicum or related organisms, degrade hydrocarbons and serve as targets for the development of therapeutic pharmaceutical compounds. In one embodiment, the RRP molecules of the invention are directly or indirectly involved in the metabolic pathway of one or more fine chemicals in C. glutamicum. In a preferred embodiment, the activity of the inventive RRP molecules of taking part indirectly or directly in such metabolic pathways affects the production of a fine chemical of interest by this microorganism. In a particularly preferred embodiment, the activity of the RRP molecules of the invention is modulated such that the C. glutamicum metabolic pathways in which the RRP proteins of the invention are involved are modulated with regard to efficiency or output, and this modulates directly or indirectly the production or efficiency of production of a fine chemical of interest by C. glutamicum.

[0047] The term “RRP protein” or “RRP polypeptide” comprises proteins whihc are capable of modulating the yield, production and/or efficiency of production of one or more fine chemicals in C. glutamicum, degrading hydrocarbons, oxidizing terpenoids, and serving as target protein for drug screening or drug design or as identification markers for C. glutamicum or related organisms. Examples of RRP proteins comprise those which are encoded by the RRP genes listed in Table 1 and Appendix A. The terms “RRP gene” and “RRP nucleic acid sequence” comprise nucleic acid sequences encoding an RRP protein which comprises a coding region and corresponding untranslated 5′ and 3′ sequence regions. Examples of RRP genes are the ones listed in Table 1. The terms “production” and “productivity” are known in the art and include the concentration of the fermentation products (for example of the fine chemical of interest, which is produced within a predetermined time interval and a predetermined fermentation volume (e.g. kg of product per h per 1)). The term “efficiency of production” comprises the time required by the cell for reaching a particular production quantity (for example, the time required by the cell for reaching a particular output rate of a fine chemical). The term “yield” or “product/carbon yield” is known in the art and comprises the efficiency of converting the carbon source into the product (i.e. the fine chemical). This is, for example, usually expressed as kg of product per kg of carbon source. Increasing the yield or production of the compound increases the amount of the molecules obtained or of the suitable obtained molecules of this compound in a particular culture volume over a predetermined period. The terms “biosynthesis” and “biosynthetic pathway” are known in the art and comprise the synthesis of a compound, preferably an organic compound, from intermediates by a cell, for example in a multistep process or highly regulated process. The terms “degradation” and “degradation pathway” are known in the art and comprise cleavage of a compound, preferably an organic compound, into degradation products (in more general terms: smaller or less complex molecules) by a cell, for example in a multistep process or highly regulated process. The term “metabolism” is known in the art and comprises the entirety of biochemical reactions which take place in an organism. The metabolism of a particular compound (e.g. the metabolism of an amino acid such as glycine) then comprises all biosynthetic, modification and degradation pathways in the cell which affect this compound.

[0048] In another embodiment, the RRP molecules of the invention are capable of modulating directly or indirectly the production of a molecule of interest, such as a fine chemical, in a microorganism such as C. glutamicum. Using gene recombination techniques, it is possible to manipulate one or more RRP proteins of the invention so that their function is modulated. This modulation of the function may lead to modulation of the yield, production and/or efficiency of production of one or more fine chemicals from C. glutamicum.

[0049] For example, it is possible, by modifying the activity of a protein involved in the biosynthesis or degradation of a fine chemical (i.e. by mutagenesis of the corresponding gene), to directly modulate the ability of the cell to synthesize or degrade this compound and thereby to modulate the yield and/or efficiency of production of the fine chemicals. Likewise, it is possible, by modulating the activity of a protein regulating a fine-chemical metabolic pathway, to have a direct influence on whether the production of the compound of interest is up- or downregulated, with both processes modulating the yield or efficiency of production of said fine chemical from the cell.

[0050] The production of fine chemicals may also be modulated indirectly by modifying the activity of a protein of the invention (i.e. by mutating the corresponding gene) so that the ability of the cell to grow and to divide ought to remain viable and productive is increased overall. Fine chemicals are usually produced from C. glutamicum by large-scale fermentative culture of these microorganisms under conditions which frequently are suboptimal for growth and cell division. By modifying a protein of the invention (for example, a stress reaction protein, a cell wall protein or proteins involved in the metabolism of compounds which are required for cell growth and cell division to take place, such as nucleotides and amino acids) so as to be able to improve the survival, growth and propagation in these conditions, it may be possible to increase the number and productivity of these modified C. glutamicum cells in large-scale cultures, and this should in turn lead to increased yields and/or increased efficiency of production of one or more fine chemicals of interest. Furthermore, the metabolic pathways of a cell are necessarily dependent on one another and coregulated. Changing the activity of any metabolic pathway in C. glutamicum (i.e. changing the activity of any of the proteins of the invention, which is involved in such a pathway) makes it possible to change in this microorganism simultaneously the activity or regulation of another metabolic pathway which may be involved directly in the synthesis or degradation of a fine chemical.

[0051] The isolated nucleic acid sequences of the invention are located in the genome of a Corynebacterium glutamicum strain which can be obtained from the American Type Culture Collection under the name ATCC 13032. The nucleotide sequence of the isolated C. glutamicum RRP nucleic acid molecules and the predicted amino acid sequences of the C. glutamicum RRP proteins are shown in Appendix A and B, respectively. Computer analyses were carried out, which classified and/or identified many of these nucleotide sequences as sequences with homology to E. coli genes or Bacillus subtilis genes.

[0052] The present invention also relates to proteins whose amino acid sequence is essentially homologous to an amino acid sequence in Appendix B. As used herein, a protein whose amino acid sequence is essentially homologous to a selected amino acid sequence is at least about 50% homologous to the selected amino acid sequence, for example to the entire selected amino acid sequence. A protein whose amino acid sequence is essentially homologous to a selected amino acid sequence may also be at least about 50-60%, preferably at least about 60-70%, more preferably at least about 70-80%, 80-90% or 90-95%, and most preferably at least about 96%, 97%, 98%, 99%, homologous or even more homologous to the selected amino acid sequence.

[0053] An RRP protein of the invention or a biologically active section or fragment thereof can modulate the yield, production and/or efficiency of production of one or more fine chemicals in C. glutamicum, degrade hydrocarbons, oxidize terpenoids, serve as a target for drug development or serve as identification marker for C. glutamicum or related organisms.

[0054] The following subsections describe various aspects of the invention in more detail:

[0055] A. Isolated Nucleic Acid Molecules

[0056] One aspect of the invention relates to isolated nucleic acid molecules which encode RRP polypeptides or biologically active sections thereof and to nucleic acid fragments which are sufficient for the use as hybridization probes or primers for identifying or amplifying RRP-encoding nucleic acids (e.g. RRP DNA). These nucleic acid molecules may be used for identifying C. glutamicum or related organisms, for mapping the genome of C. glutamicum or of related organisms or for identifying microorganisms which are suitable for producing fine chemicals, for example by fermentative processes. The term “nucleic acid molecule”, as used herein, is intended to comprise DNA molecules (e.g. cDNA or genomic DNA) and RNA molecules (e.g. mRNA) and also DNA or RNA analogs generated by means of nucleotide analogs. Moreover, this term comprises the untranslated sequence located at the 3′ and 5′ ends of the coding gene region: at least about 100 nucleotides of the sequence upstream of the 5′ end of the coding region and at least about 20 nucleotides of the sequence downstream of the 3′ end of the coding region of the gene. The nucleic acid molecule may be single-stranded or double-stranded but is preferably a double-stranded DNA. An “isolated” nucleic acid molecule is removed from other nucleic acid molecules which are present in the natural source of the nucleic acid. An “isolated” nucleic acid preferably does not have any sequences which flank the nucleic acid naturally in the genomic DNA of the organism from which the nucleic acid originates (for example sequences located at the 5′ or 3′ end of the nucleic acid). In various embodiments, the isolated RRP nucleic acid molecule may have, for example, less than about 5 kb, 4 kb, 3 kb, 2 kb, 1 kb, 0.5 kb or 0.1 kb of the nucleotide sequences which naturally flank the nucleic acid molecule in the genomic DNA of the cell from which the nucleic acid originates (e.g. a C. glutamicum cell). In addition to this, an “isolated” nucleic acid molecule such as a cDNA molecule may be essentially free of another cellular material or culture medium, if prepared by recombinant techniques, or free of chemical precursors or other chemicals, if synthesized chemically.

[0057] A nucleic acid molecule of the invention, for example a nucleic acid molecule having a nucleotide sequence of Appendix A or a section thereof, may be isolated by means of molecular biological standard techniques and the sequence information provided here. For example, a C. glutamicum RRP cDNA may be isolated from a C. glutamicum bank by using a complete sequence from Appendix A or a section thereof as hybridization probe and by using standard hybridization techniques (as described, for example, in Sambrook, J., Fritsch, E. F. and Maniatis, T. Molecular Cloning: A Laboratory Manual. 2nd Ed., Cold Spring Harbor Laboratory, Cold Spring Harbor Laboratory Press, Cold Spring Harbor, N.Y., 1989). Moreover, a nucleic acid molecule comprising a complete sequence from Appendix A or a section thereof can be isolated via polymerase chain reaction, using the oligonucleotide primers produced on the basis of said sequence (for example, it is possible to isolate a nucleic acid molecule comprising a complete sequence from Appendix A or a section thereof via polymerase chain reaction by using oligonucleotide primers which have been produced on the basis of this same sequence of Appendix A). For example, mRNA can be isolated from normal endothelial cells (for example via the guanidinium thiocyanate extraction method of Chirgwin et al. (1979) Biochemistry 18: 5294-5299), and the cDNA can be prepared by means of reverse transcriptase (e.g. Moloney-MLV reverse transcriptase, available from Gibco/BRL, Bethesda, Md., or AMV reverse transcriptase, available from Seikagaku America, Inc., St. Petersburg, Fla.) and by means of random polynucleotide primers or oligonucleotide primers based on any of the nucleotide sequences shown in Appendix A. Synthetic oligonucleotide primers for amplification via polymerase chain reaction can be produced on the basis of any of the nucleotide sequences shown in Appendix A. A nucleic acid of the invention may be amplified by means of cDNA or, alternatively, genomic DNA as template and of suitable oligonucleotide primers according to PCR standard amplification techniques. The nucleic acid amplified in this way may be cloned into a suitable vector and characterized by DNA sequence analysis. Oligonucleotides corresponding to an RRP nucleotide sequence may further be prepared by standard syntheses using, for example, an automatic DNA synthesizer.

[0058] In a preferred embodiment, an isolated nucleic acid molecule of the invention comprises one of the nucleotide sequences listed in Appendix A. The sequences of Appendix A correspond to the Corynebacterium glutamicum RRP cDNAs of the invention. These cDNAs comprise sequences, the RRP proteins (i.e. the “coding region” indicated in each sequence in Appendix A), and also the 5′ and 3′ untranslated sequences likewise indicated in Appendix A. As an alternative, the nucleic acid molecule may comprise only the coding region of any of the sequences in Appendix A.

[0059] In addition to this, the nucleic acid molecule of the invention may comprise only a section of the coding region of any of the sequences in Appendix A, for example a fragment which may be used as probe or primer or fragment which encodes a biologically active section of an RRP protein. The nucleotide sequences determined from cloning the RRP genes from C. glutamicum make it possible to generate probes and primers which are designed for identifying and/or cloning RRP homologs in other cell types and organisms and RRP homologs of other corynebacteria or related species. The probe or primer usually comprises essentially purified oligonucleotide. The oligonucleotide usually comprises a nucleotide sequence region which hybridizes under stringent conditions to at least about 12, preferably about 25, more preferably about 40, 50 or 75 successive nucleotides of a sense strand of any of the sequences indicated in Appendix A, of an antisense strand of any of the sequences indicated in Appendix A or naturally occurring mutants thereof. Primers based on a nucleotide sequence of Appendix A may be used in PCR reactions for cloning RRP homologs. Probes based on the RRP nucleotide sequences may be used for detecting transcripts or genomic sequences encoding the same protein or homologous proteins. In preferred embodiments, the probe moreover comprises a labeling group bound thereto, for example a radioisotope, a fluorescent compound, an enzyme or an enzyme cofactor. These probes may be used as part of a diagnostic assay kit for identifying cells which misexpress an RRP protein, for example by measuring an amount of an RRP-encoding nucleic acid in a cell sample, for example detecting the RRP mRNA levels, or by determining whether a genomic RRP gene has been mutated or deleted.

[0060] In one embodiment, the nucleic acid molecule of the invention encodes a protein or a section thereof comprising an amino acid sequence which is sufficiently homologous to an amino acid sequence of Appendix B for the protein or a section thereof to retain the ability to modulate the yield, production and/or efficiency of production of one or more fine chemicals in C. glutamicum, to degrade hydrocarbons, to oxidize terpenoids, to serve as a target for drug development and to serve as identification marker for C. glutamicum or related organisms. The term “sufficiently homologous”, as used herein, relates to proteins or sections thereof whose amino acid sequences have a minimum number of identical or equivalent (for example an amino acid residue having a side chain similar to that of an amino acid residue in any of the sequences of Appendix B) amino acid residues compared to an amino acid sequence of Appendix B so that the protein or a section thereof can modulate the yield, production and/or efficiency of production of one or more fine chemicals in C. glutamicum, degrade hydrocarbons, oxidize terpenoids, serve as a target for drug development or serve as identification marker for C. glutamicum or related organisms. Examples of these activities are likewise described herein. Thus, the “function of an RRP protein” contributes to the overall regulation of the metabolic pathway of one or more fine chemicals or to the degradation of a hydrocarbon or to the oxidation of a terpenoid.

[0061] Sections of proteins encoded by the RRP nucleic acid molecules of the invention are preferably biologically active sections of any of the RRP proteins. The term “biologically active section of an RRP protein”, as used herein, is intended to comprise a section, for example a domain or a motif, of an RRP protein, which modulates the yield, production and/or efficiency of production of one or more fine chemicals in C. glutamicum, degrades hydrocarbons, oxidizes terpenoids, and serves as a target for drug development or as identification marker for C. glutamicum or related organisms. In order to determine whether an RRP protein or a biologically active section thereof is able to modulate the yield, production and/or efficiency of production of one or more fine chemicals in C. glutamicum, to degrade hydrocarbons or to oxidize terpenoids, an enzyme activity assay may be carried out. These assay methods, as described in detail in example 8 of the examples, are familiar to the skilled worker.

[0062] Additional nucleic acid fragments encoding biologically active sections of an RRP protein can be prepared by isolating a section of any of the sequences in Appendix B, expressing the encoded section of the RRP protein or RRP peptide (e.g. by recombinant expression in vitro) and determining the activity of the encoded section of said RRP protein or peptide.

[0063] Moreover, the invention comprises nucleic acid molecules which differ from any of the nucleotide sequences shown in Appendix A (and sections thereof) due to the degeneracy of the genetic code and thus encode the same RRP protein as the one encoded by the nucleotide sequences shown in Appendix A. In another embodiment, an isolated nucleic acid molecule of the invention has a nucleotide sequence which encodes a protein having an amino acid sequence shown in Appendix B. In a further embodiment, the nucleic acid molecule of the invention encodes a full-length C. glutamicum protein which is essentially homologous to an amino acid sequence of Appendix B (encoded by an open reading frame shown in Appendix A).

[0064] In addition to naturally occurring variants of the RRP sequence, which may exist in the population, the skilled worker is likewise aware of the fact that it is possible to introduce changes into a nucleotide sequence of Appendix A by mutation, leading to a change in the amino acid sequence of the encoded RRP protein without impairing the functionality of said RRP protein. It is possible, for example, to produce nucleotide substitutions in a sequence of Appendix A, which lead to amino acid substitutions at “nonessential” amino acid residues. A “nonessential” amino acid residue is a residue which can be modified in the wild-type sequence of any of the RRP-proteins (Appendix B) without modification of the activity of said RRP protein, whereas an “essential” amino acid residue is required for RRP-protein activity. However, other amino acid residues (e.g. nonconserved or merely semiconserved amino acid residues in the domain with RRP activity) may not be essential for activity and thus can probably be modified without modification of the RRP activity.

[0065] Consequently, a further aspect of the invention relates to nucleic acid molecules which encode RRP proteins containing the modified amino acid residues which are nonessential for RRP activity. The amino acid sequence of these RRP proteins differs from a sequence in Appendix B, but said proteins nevertheless retain at least one of the RRP activities described herein. In one embodiment, the isolated nucleic acid molecule comprises a nucleotide sequence which encodes a protein comprising an amino acid sequence which is at least about 50% homologous to an amino acid sequence of Appendix B, which protein can modulate the yield, production and/or efficiency of production of one or more fine chemicals in C. glutamicum, degrade hydrocarbons, oxidize terpenoids, serve as a target for drug development or serve as identification marker for C. glutamicum or related organisms.

[0066] An isolated nucleic acid molecule encoding an RRP protein which is homologous to a protein sequence of Appendix B may be generated by introducing one or more nucleotide substitutions, additions or deletions into a nucleotide sequence of Appendix A so that one or more amino acid substitutions, additions or deletions are introduced into the encoded protein. The mutations may be introduced into any of the sequences of Appendix A by standard techniques such as site-directed mutagenesis and PCR-mediated mutagenesis. Preference is given to introducing conservative amino acid substitutions at one or more of the predicted nonessential amino acid residues. A “conservative amino acid substitution” replaces the amino acid residue by an amino acid residue with a similar side chain. Families of amino acid residues with similar side chains have been defined in the art. These families comprise amino acids with basic side chains (e.g. lysine, arginine, histidine), acidic side chains (e.g. aspartic acid, glutamic acid), uncharged polar side chains (e.g. glycine, asparagine, glutamine, serine, threonine, tyrosine, cysteine), nonpolar side chains (e.g. alanine, valine, leucine, isoleucine, proline, phenylalanine, methionine, tryptophan), beta-branched side chains (e.g. threonine, valine, isoleucine) and aromatic side chains (e.g. tyrosine, phenylalanine, tryptophan, histidine). A predicted nonessential amino acid residue in an RRP protein is thus preferably replaced by another amino acid residue of the same side-chain family. In a further embodiment, the mutations may alternatively be introduced randomly over the entire or over part of the RRP-encoding sequence, for example by saturation mutagenesis, and the resulting mutants may be tested for an RRP activity described herein in order to identify mutants maintaining RRP activity. After mutagenesis of any of the sequences of Appendix A, the encoded protein may be expressed recombinantly, and the activity of said protein may be determined, for example, using the assays described herein (see example 8 of the examples).

[0067] B. Recombinant Expression Vectors and Host Cells

[0068] A further aspect of the invention relates to vectors, preferably expression vectors, containing a nucleic acid which encodes an RRP protein (or a section thereof). The term “vector” as used herein, relates to a nucleic acid molecule capable of transporting another nucleic acid to which it is bound. One type of vector is a “plasmid” which term means a circular double-stranded DNA loop into which additional DNA segments can be ligated. Another type of vector is a viral vector, and here additional DNA segments can be ligated into the viral genome. Certain vectors are capable of replicating autonomously in a host cell into which they have been introduced (for example bacterial vectors with bacterial origin of replication and episomal mammalian vectors). Other vectors (e.g. nonepisomal mammalian vectors) are integrated into the genome of a host cell when introduced into said host cell and thereby replicated together with the host genome. Moreover, particular vectors are capable of controlling the expression of genes to which they are functionally linked. These vectors are referred to herein as “expression vectors”. Normally, expression vectors which can be used in DNA recombination techniques are in the form of plasmids. In the present description, “plasmid” and “vector” may be used interchangeably, since the plasmid is the most commonly used type of vector. The present invention is intended, however, to comprise other types of expression vectors such as viral vectors (for example replication-deficient retroviruses, adenoviruses and adenovirus-related viruses), which exert similar functions.

[0069] The recombinant expression vectors of the invention comprise a nucleic acid of the invention in a form which is suitable for expressing said nucleic acid in a host cell, i.e. that the recombinant expression vectors comprise one or more regulatory sequences which are selected on the basis of the host cells to be used for expression and which are functionally linked to the nucleic acid sequence to be expressed. In a recombinant expression vector, the term “functionally linked” means that the nucleotide sequence of interest is bound to the regulatory sequence(s) such that expression of said nucleotide sequence is possible (for example in an in vitro transcription/translation system or in a host cell, if the vector has been introduced into said host cell). The term “regulatory sequence” is intended to comprise promoters, repressor-binding sites, activator-binding sites, enhancer regions and other expression control elements (e.g. terminators, other elements of the mRNA secondary structure or polyadenylation signals). These regulatory sequences are described, for example, in Goeddel: Gene Expression Technology: Methods in Enzymology 185, Academic Press, San Diego, Calif. (1990). Regulatory sequences comprise those which control expression of a nucleotide sequence in many types of host cells and those which control direct expression of the nucleotide sequence only in particular host cells. The skilled worker understands that designing an expression vector may depend on factors such as the choice of host cell to be transformed, the extent of protein expression desired, etc. The expression vectors of the invention may be introduced into the host cells so as to prepare proteins or peptides, including the fusion proteins or fusion peptides, which are encoded by the nucleic acids as described herein (e.g. RRP proteins, mutated forms of RRP proteins, fusion proteins, etc.).

[0070] The recombinant expression vectors of the invention may be designed for expressing RRP proteins in prokaryotic or eukaryotic cells. For example, RRP genes may be expressed in bacterial cells such as C. glutamicum, insect cells (using baculovirus expression vectors), yeast cells and other fungal cells (see Romanos, M. A. et al. (1992) “Foreign gene expression in yeast: a review”, Yeast 8: 423-488; van den Hondel, C. A. M. J. J. et al. (1991) “Heterologous gene expression in filamentous fungi” in: More Gene Manipulations in Fungi, J. W. Bennet & L. L. Lasure, Editors, pp. 396-428: Academic Press: San Diego; and van den Hondel, C. A. M. J. J. & Punt, P. J. (1991) “Gene transfer systems and vector development for filamentous fungi in: Applied Molecular Genetics of Fungi, Peberdy, J. F. et al., Editors, pp. 1-28, Cambridge University Press: Cambridge), algal cells and cells of multicellular plants (see Schmidt, R. and Willmitzer, L. (1988) “High efficiency Agrobacterium tumefaciens-mediated transformation of Arabidopsis thaliana leaf and cotyledon explants” Plant Cell Rep.: 583-586) or mammalian cells. Suitable host cells are further discussed in Goeddel, Gene Expression Technology: Methods in Enzymology 185, Academic Press, San Diego, Calif. (1990). As an alternative, the recombinant expression vector may be transcribed and translated in vitro, for example by using T7 promoter regulatory sequences and T7 polymerase.

[0071] Proteins are expressed in prokaryotes mainly by using vectors containing constitutive or inducible promoters which control expression of fusion or nonfusion proteins. Fusion vectors control a number of amino acids to a protein encoded therein, usually at the amino terminus of the recombinant protein. These fusion vectors usually have three tasks: 1) enhancing the expression of recombinant protein; 2) increasing the solubility of the recombinant protein; and 3) supporting the purification of the recombinant protein by acting as a ligand in affinity purification. Often a proteolytic cleavage site is introduced into fusion expression vectors at the junction of fusion unit and recombinant protein so that the recombinant protein can be separated from the fusion unit after purifying the fusion protein. These enzymes and their corresponding recognition sequences comprise factor Xa, thrombin and enterokinase.

[0072] Common fusion expression vectors comprise PGEX (Pharmacia Biotech Inc; Smith, D. B. and Johnson, K. S. (1988) Gene 67: 31-40), pMAL (New England Biolabs, Beverly, Mass.) und PRIT 5 (Pharmacia, Piscataway, N.J.), in which glutathione S-transferase (GST), maltose E-binding protein and protein A, respectively, are fused to the recombinant target protein. In one embodiment, the coding sequence of the RRP protein is cloned into a PGEX expression vector such that a vector is generated, which encodes a fusion protein comprising, from N terminus to C terminus, GST—thrombin cleavage site—protein X. The fusion protein may be purified via affinity chromatography by means of a glutathione-agarose resin. The recombinant RRP protein which is not fused to GST may be obtained by cleaving the fusion protein with thrombin.

[0073] Examples of suitable inducible nonfusion E. coli expression vectors include pTrc (Amann et al., (1988) Gene 69: 301-315) and pET 11d (Studier et al. Gene Expression Technology: Methods in Enzymology 185, Academic Press, San Diego, Calif. (1990) 60-89). The target gene expression from the pTrc vector is based on transcription from a hybrid trp-lac fusion promoter by host RNA polymerase. The target gene expression from the pET11d vector is based on transcription from a T7-gn10-lac fusion promoter, which is mediated by a coexpressed viral RNA polymerase (T7 gn1). This viral polymerase is provided in the BL 21 (DE3) or HMS174 (DE3) host strain by a resident λ prophage which harbors a T7 gn1 gene under the transcriptional control of the lacUV 5 promoter.

[0074] One strategy for maximizing expression of the recombinant protein is to express said protein in a host bacterium whose ability to proteolytically cleave said recombinant protein is disrupted (Gottesman, S. Gene Expression Technology: Methods in Enzymology 185, Academic Press, San Diego, Calif. (1990) 119-128). Another strategy is to modify the nucleic acid sequence of the nucleic acid to be inserted into an expression vector such that the individual codons for each amino acid are those which are preferably used in a bacterium selected for expression, such as C. glutamicum (Wada et al. (1992) Nucleic Acids Res. 20: 2111-2118). This modification of the nucleic acid sequences of the invention can be carried out by standard techniques of DNA synthesis.

[0075] In a further embodiment, the RRP-protein expression vector is a yeast expression vector. Examples of vectors for expression in the yeast S. cerevisiae include pYepSec1 (Baldari et al., (1987) Embo J. 6: 229-234), pMFa (Kurjan and Herskowitz (1982) Cell 30: 933-943), pJRY88 (Schultz et al. (1987) Gene 54: 113-123) and pYES2 (Invitrogen Corporation, San Diego, Calif.). Vectors and methods for constructing vectors which are suitable for use in other fungi such as filamentous fungi include those which are described in detail in: van den Hondel, C. A. M. J. J. & Punt, P. J. (1991) “Gene transfer systems and vector development for filamentous fungi, in: Applied Molecular Genetics of Fungi, J. F. Peberdy et al., Editors, pp. 1-28, Cambridge University Press: Cambridge.

[0076] As another alternative, it is possible to express the RRP proteins of the invention in insect cells using baculovirus expression vectors. Baculovirus vectors available for expression of proteins in cultured insect cells (e.g. Sf9 cells) include the pAc series (Smith et al., (1983) Mol. Cell Biol. 3: 2156-2165) and the pVL series (Lucklow and Summers (1989) Virology 170: 31-39).

[0077] In a further embodiment, the RRP proteins of the invention may be expressed in cells of unicellular plants (such as algae) or in cells of the higher plants (e.g. spermatophytes such as crops). Examples of expression vectors of plants include those which are described in detail in: Bekker, D., Kemper, E., Schell, J. and Masterson, R. (1992) “New plant binary vectors with selectable markers located proximal to the left border”, Plant Mol. Biol. 20: 1195-1197; and Bevan, M. W. (1984) “Binary Agrobacterium vectors for plant transformation”, Nucl. Acids Res. 12: 8711-8721.

[0078] A further embodiment, a nucleic acid of the invention is expressed in mammalian cells using a mammalian expression vector. Examples of mammalian expression vectors include pCDM8 (Seed, B. (1987) Nature 329:840) and pMT2PC (Kaufman et al. (1987) EMBO J. 6: 187-195). When used in mammalian cells, the control functions of the expression vector are often provided by viral regulatory elements. Commonly used promoters are derived, for example, from polyoma, adenovirus 2, cytomegalovirus and simian virus 40. Other suitable expression systems for prokaryotic and eukaryotic cells can be found in chapters 16 and 17 by Sambrook, J., Fritsch, E. F. and Maniatis, T., Molecular cloning: A Laboratory Manual, 2nd Edition, Cold Spring Harbor Laboratory, Cold Spring Harbor Laboratory Press, Cold Spring Harbor, N.Y., 1989.

[0079] In a further embodiment, the recombinant mammalian expression vector may preferably cause expression of the nucleic acid in a particular cell type (for example, tissue-specific regulatory elements are used for expressing the nucleic acid). Tissue-specific regulatory elements are known in the art. Non-limiting examples of suitable tissue-specific promoters include the albumin promoter (liver-specific; Pinkert et al. (1987) Genes Dev. 1: 268-277), lymphoid-specific promoters (Calame und Eaton (1988) Adv. Immunol. 43: 235-275), in particular promoters of T-cell receptors (Winoto and Baltimore (1989) EMBO J. 8: 729-733) and immunoglobulins (Banerji et al. (1983) Cell 33: 729-740; Queen and Baltimore (1983) Cell 33: 741-748), neuron-specific promoters (e.g. the neurofilament promoter; Byrne and Ruddle (1989) PNAS 86: 5473-5477), pancreas-specific promoters (Edlund et al., (1985) Science 230: 912-916) and mamma-specific promoters (e.g. milk serum promoter; U.S. Pat. No. 4,873,316 and European Patent Application document No. 264 166). Development-regulated promoters for example the murine hox promoters (Kessel and Gruss (1990) Science 249: 374-379) and the α-fetoprotein promoter (Campes and Tilghman (1989) Genes Dev. 3: 537-546), are likewise included.

[0080] Moreover, the invention provides a recombinant expression vector comprising an inventive DNA molecule which has been cloned into the expression vector in antisense direction. This means that the DNA molecule is functionally linked to a regulator sequence such that expression of an RNA molecule which is antisense to RRP mRNA becomes possible (via transcription of the DNA molecule). It is possible to select regulatory sequences which are functionally bound to a nucleic acid cloned in antisense direction and which control continuous expression of the antisense RNA molecule in a multiplicity of cell types; for example, it is possible to select viral promoters and/or enhancers or regulatory sequences which control the constitutive tissue-specific or cell type-specific expression of antisense RNA. The antisense expression vector may be in the form of a recombinant plasmid, phagemid or attenuated virus and produces antisense nucleic acids under the control of a highly effective regulatory region whose activity is determined by the cell type into which the vector is introduced. The regulation of gene expression by means of antisense genes is discussed in Weintraub, H. et al., Antisense—RNA as a molecular tool for genetic analysis, Reviews—Trends in Genetics, Vol. 1(1) 1986.

[0081] A further aspect of the invention relates to the host cells into which a recombinant expression vector of the invention has been introduced. The terms “host cell” and “recombinant host cell” are used interchangeably herein. Naturally, these terms relate not only to a particular target cell but also to the progeny or potential progeny of this cell. Since particular modifications may appear in successive generations, due to mutation or environmental factors, this progeny is not necessarily identical to the parental cell but is still included within the scope of the term as used herein.

[0082] A host cell may be a prokaryotic or eukaryotic cell. For example, an RRP protein may be expressed in bacterial cells such as C. glutamicum, insect cells, yeast cells or mammalian cells (such as Chinese hamster ovary (CHO) cells or COS cells). Other suitable host cells are familiar to the skilled worker. Microorganisms which are related to Corynebacterium glutamicum and can be used in a suitable manner as host cells for the nucleic acid and protein molecules of the invention are listed in Table 3.

[0083] Conventional transformation or transfection methods can be used to introduce vector DNA into prokaryotic or eukaryotic cells. The terms “transformation” and “transfection”, “conjugation” and “transduction”, as used herein, are intended to comprise a multiplicity of methods known in the art for introducing foreign nucleic acid (e.g. DNA) into a host cell, including natural competence, chemically mediated transfer, calcium phosphate or calcium chloride coprecipitation, DEAE dextran-mediated transfection, lipofection or electroporation. Suitable methods for transformation or transfection of host cells can be found in Sambrook et al. (Molecular Cloning: A Laboratory Manual. 2nd Edition, Cold Spring Harbor Laboratory, Cold Spring Harbor Laboratory Press, Cold Spring Harbor, N.Y., 1989) and other laboratory manuals.

[0084] In the case of stable transfection of mammalian cells, it is known that, depending on the expression vector used and the transfection technique used, only a small proportion of the cells can integrate the foreign DNA into their genome. These integrants are usually identified and selected by introducing a gene which encodes a selectable marker (e.g. resistant to antibiotics) together with the gene of interest into the host cells. Preferred selectable markers include those which impart resistance to drugs such as G418, hygromycin and methotrexate. A nucleic acid which encodes a selectable marker may be introduced into a host cell on the same vector that encodes an RRP protein or may be introduced in a separate vector. Cells which have been stably transfected with the introduced nucleic acid may be identified for example by drug selection (for example, cells which have integrated the selectable marker survive, whereas the other cells die).

[0085] A homologous recombined microorganism is generated by preparing a vector which contains at least one RRP-gene section into which a deletion, addition or substitution has been introduced in order to modify, for example functionally disrupt, the RRP gene. Said RRP gene is preferably a Corynebacterium glutamicum RRP gene, but it is also possible to use a homolog from a related bacterium or even from a mammalian, yeast or insect source. In a preferred embodiment, the vector is designed such that homologous recombination functionally disrupts the endogenous RRP gene (i.e., the gene no longer encodes a functional protein; also referred to as “knockout” vector). As an alternative, the vector may be designed such that homologous recombination mutates or otherwise modifies the endogenous RRP gene which, however, still encodes the functional protein (for example, the regulatory region located upstream may be modified such that thereby expression of the endogenous RRP protein is modified.). The modified RRP-gene fraction in the homologous recombination vector is flanked at its 5′ and 3′ ends by additional nucleic acids of the RRP gene, which makes possible a homologous recombination between the exogenous RRP gene carried by the vector and an endogenous RRP gene in a microorganism. The length of the additional flanking RRP nucleic acid is sufficient for a successful homologous recombination with the endogenous gene. Usually, the vector contains less than one kilobase of flanking DNA (both at the 5′ and the 3′ ends) (see, for example, Thomas, K. R. and Capecchi, M. R. (1987) Cell 51: 503, for a description of homologous recombination vectors). The vector is introduced into a microorganism (e.g. by electroporation) and cells in which the introduced RRP gene has homologously recombined with the endogenous RRP gene are selected using methods known in the art.

[0086] In another embodiment, it is possible to produce recombinant microorganisms which contain selected systems which make possible a regulated expression of the introduced gene. The insertion of an RRP gene in a vector, as a result of which it is brought under the control of the lac operon, enables, for example, RRP-gene expression only in the presence of IPTG. These regulatory systems are known in the art.

[0087] A host cell of the invention, such as a prokaryotic or eukaryotic host cell in culture, may be used for producing (i.e. expressing) an RRP protein. Moreover, the invention provides methods for producing RRP proteins by using the host cells of the invention. In one embodiment, the method comprises the cultivation of the host cell of the invention (into which a recombinant expression vector encoding an RRP protein has been introduced or in whose genome a gene encoding a wild-type or modified RRP protein has been introduced) in a suitable medium until the RRP protein has been produced. In a further embodiment, the method comprises isolating the RRP proteins from the medium or the host cell.

[0088] C. Uses and Methods of the Invention

[0089] The nucleic acid molecules, proteins, protein homologs, fusion proteins, primers, vectors and host cells described herein may be used in one or more of the following methods: identification of C. glutamicum and related organisms, mapping of genomes of organisms related to C. glutamicum, identification and localization of C. glutamicum sequences of interest, evolutionary studies, determination of RRP-protein regions required for function, modulation of the activity of an RRP protein; modulation of the activity of one or more metabolic pathways and modulation of the cellular production of a compound of interest, such as a fine chemical. The RRP nucleic acid molecules of the invention have a multiplicity of uses. First, they may be used for identifying an organism as Corynebacterium glutamicum or close relatives thereof. They may also be used for identifying the presence of C. glutamicum or a relative thereof in a mixed population of microorganisms. The invention provides the nucleic acid sequences of a number of C. glutamicum genes. Probing the extracted genomic DNA of a culture of a uniform or mixed population of microorganisms under stringent conditions with a probe which covers a region of a C. glutamicum gene which is unique for this organism makes it possible to determine whether said organism is present. Although Corynebacterium glutamicum itself is nonpathogenic, it is related to pathogenic species such as Corynebacterium diphtheriae. The detection of such an organism is of substantial clinical importance.

[0090] The presence of C. glutamicum in a sample can be detected by using techniques known in the art. In particular, the cells in the sample may first be grown in a suitable liquid or on a suitable solid culture medium in order to increase the number of cells in the culture. Said cells are lysed and all of the DNA contained therein is extracted and, where appropriate, purified in order to remove cell debris and protein material, which could interfere with the subsequent analysis. A polymerase chain reaction or a similar technique known in the art is carried out (a general overview over methodologies usually used for nucleic acid sequence amplification can be found in Mullis et al., U.S. Pat. No. 4,683,195, Mullis et al., U.S. Pat. No. 4,965,188 and Innis, M. A. and Gelfand, D. H. (1989) PCR-Protocols, A guide to Methods and Applications, Academic Press, pp. 3-12, and (1988) Biotechnology 6:1197 and international Patent Application No. WO89/01050), with primers which are specific for an RRP nucleic acid molecule of the invention being incubated with the nucleic acid sample so that said particular RRP nucleic acid sequence is amplified, if present in the sample. The particular nucleic acid sequence to be amplified is selected on the basis of its exclusive presence in the genome of C. glutamicum and of only a few closely related bacteria. The presence of the desired amplification product indicates the presence of C. glutamicum or an organism closely related to C. glutamicum.

[0091] The nucleic acid and protein molecules of the invention may further serve as markers for specific regions of the genome. Using techniques known in the art, it is possible to detect the physical location of the RRP nucleic acid molecules of the invention on the C. glutamicum genome, and this may be used in turn to localize more easily other nucleic acid molecules and genes on the map. Moreover, the nucleic acid molecules of the invention may be sufficiently homologous to the sequences of related species for these nucleic acid molecules to likewise enable the construction of a genomic map in such bacteria (e.g. Brevibacterium lactofermentum).

[0092] The nucleic acid and protein molecules of the invention are suitable not only for mapping the genome but also for functional studies of C. glutamicum proteins. The genome region to which a particular C. glutamicum DNA-binding protein binds may be identified by cleaving, for example, the C. glutamicum genome and incubating the fragments with said DNA-binding protein. Those fragments which bind to the protein may additionally be probed with the nucleic acid molecules of the invention, preferably by using readily detectable labels; binding of such a nucleic acid molecule to the genomic fragment enables the localization of said fragment on the genomic map of C. glutamicum, and this facilitates a rapid determination of the nucleic acid sequence to which the protein binds, if carried out several times using different enzymes.

[0093] The RRP nucleic acid molecules of the invention are likewise suitable for evolutionary studies and protein structure studies. A multiplicity of prokaryotic and eukaryotic cells utilize the metabolic processes in which the molecules of the invention are involved; it is possible, by comparing the sequences of the nucleic acid molecules of the invention with those encoding similar enzymes from other organisms, to determine the degree of evolutionary relatedness of said organisms. Accordingly, such a comparison makes it possible to determine which sequences are conserved and which are not, and this may be helpful in determining those protein regions which are essential for enzyme function. This type of determination is valuable for protein engineering studies and may indicate how much mutagenesis said protein can tolerate without losing its function.

[0094] The RRP proteins of the invention can be used as markers for classifying an unknown bacterium as C. glutamicum or for identifying C. glutamicum or closely related bacteria in a sample. Using techniques known in the art, it is possible, for example, to amplify, where appropriate, cells in a sample (for example by cultivation in a suitable medium) in order to increase the size of the sample, and then to lyse said cells so that the proteins contained therein are released. Said sample may be purified, where appropriate, in order to remove cell debris and nucleic acid molecules, which could interfere with the subsequent analysis. Antibodies specific for a selected RRP protein of the invention may be incubated with the protein sample in a typical Western assay format (see, for example, Ausubel et al., (1988) Current Protocols in Molecular Biology, Wiley: N.Y.), with the antibody binding to its target protein, if this protein is present in the sample. An RRP protein is selected for this type of assay if it is unique or almost unique in C. glutamicum or in C. glutamicum and very closely related bacteria. The proteins in the sample are then fractionated by gel electrophoresis and transferred to a suitable matrix such as nitrocellulose. A suitable secondary antibody with a detectable label (e.g. chemiluminescent or calorimetric) is incubated with said matrix, followed by stringent washing. The presence or absence of the label indicates the presence or absence of the target protein in the sample. If the protein is present, this indicates the presence of C. glutamicum. A similar method makes it possible to classify an unknown bacterium as C. glutamicum; this bacterium is probably not C. glutamicum if a number of C. glutamicum-specific proteins are not detected in the protein samples which have been prepared from said unknown bacterium.

[0095] Genetic manipulation of the RRP nucleic acid molecules of the invention can produce RRP proteins with functional differences compared to the wild-type RRP proteins. These proteins may be improved with regard to their efficiency or activity, may be present in the cell in a larger amount than usual or may be weakened with regard to their efficiency or activity.

[0096] These changes in activity may directly moderate the yield, production and/or efficiency of production of one or more fine chemicals in C. glutamicum. It is possible, for example, by modifying the activity of a protein involved in the biosynthesis or degradation of a fine chemical (i.e. by mutating the corresponding gene) to directly modulate the ability of the cell to synthesize or degrade this compound and thereby to modulate the yield and/or efficiency of production of said fine chemical. Likewise, it is possible, by modulating the activity of a protein which regulates a metabolic pathway of a fine chemical, to have a direct influence on whether production of the compound of interest is up- or downregulated, with both of these processes modulating the yield or efficiency of production of the fine chemical from the cell.

[0097] Modification of the activity of a protein of the invention (i.e. mutagenesis of the corresponding gene) may also modulate indirectly the production of fine chemicals so that the ability of the cell to grow and to divide or to remain viable and productive is increased overall. Fine chemicals are usually produced from C. glutamicum by a large-scale fermentative culture of these microorganisms under conditions which frequently are suboptimal for growth and cell division. It may be possible, by modifying a protein of the invention (e.g. a stress reaction protein, a cell wall protein or a protein involved in the metabolism of compounds required for cell growth and cell division to take place, such as nucleotides and amino acids) so that better survival, growth and propagation is possible under said conditions, to increase the number and productivity of these modified C. glutamicum cells in large-scale culture, and this should in turn lead to increased yields and/or increased efficiency of production of one or more fine chemicals of interest. Furthermore, the metabolic pathways of a cell are necessarily dependent on one another and coregulated. It is possible, by changing the activity of any metabolic pathway in C. glutamicum (i.e. by changing the activity of any of the proteins of the invention, which are involved in such a pathway), to change simultaneously the activity or regulation of another metabolic pathway in said microorganism, which may be involved directly in the synthesis or degradation of a fine chemical.

[0098] These abovementioned strategies for the mutagenesis of RRP proteins, which ought to increase the yields of a fine chemical in C. glutamicum, are not intended to be limiting; variations of these mutagenesis strategies are quite obvious to the skilled worker. By using these strategies and including the mechanisms disclosed herein, it is possible to use the nucleic acid and protein molecules of the invention in order to generate C. glutamicum or related bacterial strains expressing mutated RRP nucleic acids and protein molecules so as to improve the yield, production and/or efficiency of production of a compound of interest. The compound of interest may be any product produced by C. glutamicum including the end products of biosynthetic pathways and intermediates of naturally occurring metabolic pathways and also molecules which do not naturally occur in the C. glutamicum metabolism but are produced by a C. glutamicum strain of the invention.

[0099] The following examples which are not to be understood as being limiting further illustrate the present invention. The contents of all references, patent applications, patents and published patent applications cited in this patent application are hereby incorporated by way of reference.

### EXAMPLES

### Example 1

### Preparation of Total Genomic DNA from Corynebacterium glutamicum ATCC13032

[0100] A Corynebacterium glutamicum (ATCC 13032) culture was cultivated with vigorous shaking in BHI medium (Difco) at 30° C. overnight. The cells were harvested by centrifugation, the supernatant was discarded and the cells were resuspended in 5 ml of buffer I (5% of the original culture volume—all volumes stated have been calculated for a culture volume of 100 ml). Composition of buffer I: 140.34 g/l sucrose, 2.46 g/l MgSO₄·7 H₂O, 10 ml/l KH₂PO₄ solution (100 g/l, adjusted to pH 6.7 with KOH), 50 ml/l M12 concentrate (10 g/l (NH₄)₂SO₄, 1 g/l NaCl, 2 g/l MgSO₄·7 H₂O, 0.2 g/l CaCl₂, 0.5 g/l yeast extract (Difco), 10 ml/l trace element mixture (200 mg/l FeSO₄·H₂O, 10 mg/l ZnSO₄·7 H₂O, 3 mg/l MnCl₂·4 H₂O, 30 mg/l H₃BO₃, 20 mg/l CoCl₂·6 H₂O, 1 mg/l NiCl₂·6 H₂O, 3 mg/l Na₂MoO₄·2 H₂O), 500 mg/l complexing agents (EDTA or citric acid), 100 ml/l vitamin mixture (0.2 ml/l biotin, 0.2 mg/l folic acid, 20 mg/l p-aminobenzoic acid, 20 mg/l riboflavin, 40 mg/l Ca panthothenate, 140 mg/l nicotinic acid, 40 mg/l pyridoxal hydrochloride, 200 mg/l myoinositol). Lysozyme was added to the suspension at a final concentration of 2.5 mg/ml. After incubation at 37° C. for approx. 4 h, the cell wall was degraded and the protoplasts obtained were harvested by centrifugation. The pellet was washed once with 5 ml of buffer I and once with 5 ml of TE buffer (10 mM Tris-HCl, 1 mM EDTA, pH 8). The pellet was resuspended in 4 ml of TE buffer and 0.5 ml of SDS solution (10%) and 0.5 ml of NaCl solution (5 M) were added. After addition of proteinase K at a final concentration of 200 μg/ml, the suspension was incubated at 37° C. for approx. 18 h. The DNA was purified via extraction with phenol, phenol/chloroform/isoamyl alcohol and chloroform/isoamyl alcohol by means of standard methods. The DNA was then precipitated by addition of 1/50 volume of 3 M sodium acetate and 2 volumes of ethanol, subsequent incubation at −20° C. for 30 min and centrifugation at 12 000 rpm in a high-speed centrifuge using an SS34 rotor (Sorvall) for 30 min. The DNA was dissolved in 1 ml of TE buffer containing 20 μ/g/ml RNase A and dialyzed against 1000 ml of TE buffer at 4° C. for at least 3 h. The buffer was exchanged 3 times during this period. 0.4 ml of 2 M LiCl and 0.8 ml of ethanol were added to 0.4 ml aliquots of the dialyzed DNA solution. After incubation at −20° C. for 30 min, the DNA was collected by centrifugation (13 000 rpm, Biofuge Fresco, Heraeus, Hanau, Germany). The DNA pellet was dissolved in TE buffer. It was possible to use DNA prepared by this method for all purposes, including Southern blotting and constructing genomic libraries.

### Example 2

### Construction of Genomic Corynebacterium glutamicum (ATCC13032) Banks in Escherichia coli

[0101] Starting from DNA prepared as described in Example 1, cosmid and plasmid banks were prepared according to known and well-established methods (see, for example, Sambrook, J. et al. (1989) “Molecular Cloning: A Laboratory Manual”. Cold Spring Harbor Laboratory Press or Ausubel, F. M. et al. (1994) “Current Protocols in Molecular Biology”, John Wiley & Sons).

[0102] It was possible to use any plasmid or cosmid. Particular preference was given to using the plasmids pBR322 (Sutcliffe, J. G. (1979) Proc. Natl Acad. Sci. USA, 75: 3737-3741); pACYC177 (Change & Cohen (1978) J. Bacteriol. 134: 1141-1156); pBS series plasmids (pBSSK+, PBSSK− and others; Stratagene, LaJolla, USA) or cosmids such as SuperCos1 (Stratagene, LaJolla, USA) or Lorist6 (Gibson, T. J. Rosenthal, A., and Waterson, R. H. (1987) Gene 53: 283-286.

### Example 3

### DNA Sequencing and Functional Computer Analysis

[0103] Genomic banks, as described in Example 2, were used for DNA sequencing according to standard methods, in particular the chain termination method using ABI377 sequencers (see, for example, Fleischman, R. D. et al. (1995) “Whole-genome Random Sequencing and Assembly of Haemophilus Influenzae Rd., Science 269; 496-512). Sequencing primers having the following nucleotide sequences were used: 5′-GGAAACAGTATGACCATG-3′ oder 5′-GTAAAACGACGGCCAGT-3′.

### Example 4

### In Vivo Mutagenesis

[0104] In vivo mutagenesis of Corynebacterium glutamicum may be carried out by passing a plasmid (or other vector) DNA through E. coli or other microorganisms (e.g. Bacillus spp. or yeasts such as Saccharomyces cerevisiae) which cannot maintain the integrity of their genetic information. Common mutator strains contain mutations in the genes for the DNA repair system (e.g., mutHLS, mutD, mutT, etc., for comparison see Rupp, W. D. (1996) DNA repair mechanisms in Escherichia coli and Salmonella, pp. 2277-2294, ASM: Washington). These strains are known to the skilled worker. The use of these strains is illustrated, for example, in Greener, A. and Callahan, M. (1994) Strategies 7:32-34.

### Example 5

### DNA Transfer Between Escherichia coli and Corynebacterium glutamicum

[0105] A plurality of Corynebacterium and Brevibacterium species contain endogenous plasmids (such as, for example, pHM1519 or pBL1) which replicate autonomously (for a review see, for example, Martin, J. F. et al. (1987) Biotechnology 5: 137-146). Shuttle vectors for Escherichia coli and Corynebacterium glutamicum can be constructed readily by means of standard vectors for E. coli (Sambrook, J. et al., (1989), “Molecular Cloning: A Laboratory Manual”, Cold Spring Harbor Laboratory Press or Ausubel, F. M. et al. (1994) “Current Protocols in Molecular Biology”, John Wiley & Sons), to which an origin of replication for and a suitable marker from Corynebacterium glutamicum is added. Such origins of replication are preferably taken from endogenous plasmids which have been isolated from Corynebacterium and Brevibacterium species. Particularly useful transformation markers for these species are genes for kanamycin resistance (such as those derived from the Tn5 or the Tn903 transposon) or for chloramphenicol resistance (Winnacker, E. L. (1987) “From Genes to Clones—Introduction to Gene Technology, VCH, Weinheim). There are numerous examples in the literature for preparing a large multiplicity of shuttle vectors which replicate in E. coli and C. glutamicum and can be used for various purposes, including the overexpression of genes (see, for example, Yoshihama, M. et al. (1985) J. Bacteriol. 162: 591-597, Martin, J. F. et al., (1987) Biotechnology, 5: 137-146 and Eikmanns, B. J. et al. (1992) Gene 102: 93-98).

[0106] Standard methods make it possible to clone a gene of interest into one of the above-described shuttle vectors and to introduce such hybrid vectors into Corynebacterium glutamicum strains. C. glutamicum can be transformed via protoplast transformation (Kastsumata, R. et al., (1984) J. Bacteriol. 159, 306-311), electroporation (Liebl, E. et al., (1989) FEMS Microbiol. Letters, 53: 399-303) and, in cases in which specific vectors are used, also via conjugation (as described, for example, in Schäfer, A., et al. (1990) J. Bacteriol. 172: 1663-1666).

[0107] Likewise, it is possible to transfer the shuttle vectors for C. glutamicum to E. coli by preparing plasmid DNA from C. glutamicum (by means of standard methods known in the art) and transforming it into E. coli. This transformation step can be carried out using standard methods but advantageously an Mcr-deficient E. coli strain such as NM522 (Gough & Murray (1983) J. Mol. Biol. 166: 1-19) is used.

### Example 6

### Determination of the Expression of the Mutant Protein

[0108] The observations of the activity of a mutated protein in a transformed host cell are based on the fact that the mutant protein is expressed in a similar manner and in similar quantity to the wild-type protein. A suitable method for determining the amount of transcription of the mutant gene (an indication of the amount of mRNA available for translation of the gene product) is to carry out a Northern blot (see, for example, Ausubel et al., (1988) Current Protocols in Molecular Biology, Wiley: N.Y.), with a primer which is designed such that it binds to the gene of interest being provided with a detectable (usually radioactive or chemiluminescent) label such that—when the total RNA of a culture of the organism is extracted, fractionated on a gel, transferred to a stable matrix and incubated with this probe-binding and binding quantity of the probe indicate the presence and also the amount of mRNA for said gene. This information is an indication of the extent to which the mutant gene has been transcribed. Total cell RNA can be isolated from Corynebacterium glutamicum by various methods known in the art, as described in Bormann, E. R. et al., (1992) Mol. Microbiol. 6: 317-326.

[0109] The presence or the relative amount of protein translated from said mRNA can be determined by using standard techniques such as Western blot (see, for example, Ausubel et al. (1988) “Current Protocols in Molecular Biology”, Wiley, N.Y.). In this method, total cell proteins are extracted, fractionated by gel electrophoresis, transferred to a matrix such as nitrocellulose and incubated with a probe, for example an antibody, which binds specifically to the protein of interest. This probe is usually provided with a chemiluminescent or colorimetric label which can be readily detected. The presence and the observed amount of label indicate the presence and the amount of the desired mutant protein in the cell.

### Example 7

### Growth of Genetically Modified Corynebacterium glutamicum—Media and Cultivation Conditions

[0110] Genetically modified corynebacteria are cultivated in synthetic or natural growth media. A number of different growth media for corynebacteria are known and readily available (Lieb et al. (1989) Appl. Microbiol. Biotechnol. 32: 205-210; von der Osten et al. (1998) Biotechnology Letters 11: 11-16; Patent DE 4 120 867; Liebl (1992) “The Genus Corynebacterium”, in: The Procaryotes, Vol. II, Balows, A., et al., editors Springer-Verlag). These media are composed of one or more carbon sources, nitrogen sources, inorganic salts, vitamins and trace elements. Preferred carbon sources are sugars such as mono-, di- or polysaccharides. Examples of very good carbon sources are glucose, fructose, mannose, galactose, ribose, sorbose, ribulose, lactose, maltose, sucrose, raffinose, starch and cellulose. Sugars may also be added to the media via complex compounds such as molasses or other byproducts of sugar refining. It may also be advantageous to add mixtures of various carbon sources. Other possible carbon sources are alcohols and organic acids, such as methanol, ethanol, acetic acid or lactic acid. Nitrogen sources are usually organic or inorganic nitrogen compounds or materials containing these compounds. Examples of nitrogen sources include ammonia gas and ammonium salts such as NH₄Cl or (NH₄)₂SO₄, NH₄OH, nitrates, urea, amino acids and complex nitrogen sources such as cornsteep liquor, soya meal, soya protein, yeast extract, meat extract and others.

[0111] Inorganic salt compounds which may be present in the media include the chloride, phosphorus or sulfate salts of calcium, magnesium, sodium, cobalt, molybdenum, potassium, manganese, zinc, copper and iron. Chelating agents may be added to the medium in order to keep the metal ions in solution. Particularly suitable chelating agents include dihydroxyphenols such as catechol or protocatechuate and organic acids such as citric acid. The media usually also contain other growth factors such as vitamins or growth promoters, examples of which include biotin, riboflavin, thiamine, folic acid, nicotinic acid, panthothenate and pyridoxine. Growth factors and salts are frequently derived from complex media components such as yeast extract, molasses, cornsteep liquor and the like. The exact composition of the media heavily depends on the particular experiment and is decided upon individually for each specific case. Information on the optimization of media can be found in the textbook “Applied Microbiol. Physiology, A Practical Approach” (editors P. M. Rhodes, P. F. Stanbury, IRL Press (1997) pp. 53-73, ISBN 0 19 963577 3). Growth media can also be obtained from commercial suppliers, for example Standard 1 (Merck) or BHI (brain heart infusion, DIFCO) and the like.

[0112] All media components are sterilized, either by heat (20 min at 1.5 bar and 121° C.) or by sterile filtration. The components may be sterilized either together or, if required, separately. All media components may be present at the start of the cultivation or added continuously or batchwise, as desired.

[0113] The cultivation conditions are defined separately for each experiment. The temperature should be between 15° C. and 45° C. and may be kept constant or may be altered during the experiment. The pH of the medium should be in the range from 5 to 8.5, preferably around 7.0 and may be maintained by adding buffers to the media. An example of a buffer for this purpose is a potassium phosphate buffer. Synthetic buffers such as MOPS, HEPES; ACES, etc. may be used alternatively or simultaneously. Addition of NaOH or NH₄OH can also keep the pH constant during cultivation. If complex media components such as yeast extract are used, the demand for additional buffers decreases, since many complex compounds have a high buffer capacity. In the case of using a fermenter for cultivating microorganisms, the pH may also be regulated using gaseous ammonia.

[0114] The incubation period is usually in a range from several hours to several days. This time is selected such that the maximum amount of product accumulates in the broth. The growth experiments disclosed may be carried out in a multiplicity of containers such as microtiter plates, glass tubes, glass flasks or glass or metal fermenters of different sizes. For the screening of a large number of clones, the microorganisms should be grown in microtiter plates, glass tubes or shaker flasks either with or without baffles. Preference is given to using 100 ml shaker flasks which are filled with 10% (based on volume) of the required growth medium. The flasks should be shaken on an orbital shaker (amplitude 25 mm) at a speed in the range of 100-300 rpm. Losses due to evaporation can be reduced by maintaining a humid atmosphere; alternatively, the losses due to evaporation should be corrected mathematically.

[0115] If genetically modified clones are investigated, an unmodified control clone or a control clone containing the basic plasmid without insert should also be assayed. The medium is inoculated to an OD₆₀₀ of 0.5-1.5, with cells being used which have been grown on agar plates such as CM plates (10 g/l glucose, 2.5 g/l NaCl, 2 g/l urea, 10 g/l polypeptone, 5 g/l yeast extract, 5 g/l eat extract, 22 g/l agar pH 6.8 with 2 M NaOH) which have been incubated at 30° C. The media are inoculated either by introducing a saline solution of C. glutamicum cells from CM plates or by adding a liquid preculture of said bacterium.

### Example 8

### In Vitro Analysis of the Function of Mutant Proteins

[0116] The determination of the activities and kinetic parameters of enzymes is well known in the art. Experiments for determining the activity of a particular modified enzyme must be adapted to the specific activity of the wild-type enzyme, and this is within the capabilities of the skilled worker. Overviews regarding enzymes in general and also specific details concerning the structure, kinetics, principles, methods, applications and examples of the determination of many enzyme activities can be found, for example, in the following references: Dixon, M., and Webb, E. C: (1979) Enzymes, Longmans, London; Fersht (1985) Enzyme Structure and Mechanism, Freeman, N.Y.; Walsh (1979) Enzymatic Reaction Mechanisms. Freeman, San Francisco; Price, N. C., Stevens, L. (1982) Fundamentals of Enzymology. Oxford Univ. Press: Oxford; Boyer, P. D: editors (1983) The Enzymes, 3rd edition, Academic Press, New York; Bisswanger, H. (1994) Enzymkinetik, 2nd edition VCH, Weinheim (ISBN 3527300325); Bergmeyer, H. U., Bergmeyer, J., Graβl, M. editors (1983-1986) Methods of Enzymatic Analysis, 3rd edition, Vol. I-XII, Verlag Chemie: Weinheim; and Ullmann's Encyclopedia of Industrial Chemistry (1987) Vol. A9, “Enzymes”, VCH, Weinheim, pp. 352-363.

[0117] The activity of proteins binding to DNA can be measured by many well-established methods such as DNA bandshift assays (which are also referred to as gel retardation assays). The action of these proteins on the expression of other molecules can be measured using reporter gene assays (as described in Kolmar, H. et al., (1995) EMBO J. 14: 3895-3904 and in references therein). Reporter gene assay systems are well known and established for applications in prokaryotic and eukaryotic cells, with enzymes such as beta-galactosidase, green fluorescent protein and several other enzymes being used.

[0118] The activity of membrane transport proteins can be determined according to techniques as are described in Gennis, R. B. (1989) “Pores, Channels and Transporters”, in Biomembranes, Molecular Structure and Function, Springer: Heidelberg, pp. 85-137; 199-234; and 270-322.

### Example 9

### Analysis of the Influence of Mutated Protein on the Production of the Product of Interest

[0119] The effect of the genetic modification in C. glutamicum on the production of a compound of interest (such as an amino acid) can be determined by growing the modified microorganisms under suitable conditions (such as the ones described above) and testing the medium and/or the cellular components with regard to increased production of the product of interest (i.e. an amino acid). Such analytical techniques are well known to the skilled worker and include spectroscopy, thin-layer chromatography, various types of coloring methods, enzymic and microbiological methods and analytical chromatography such as high performance liquid chromatography (see, for example, Ullman, Encyclopedia of Industrial Chemistry, Vol. A2, pp. 89-90 and pp. 443-613, VCH: Weinheim (1985); Fallon, A., et al., (1987) “Applications of HPLC in Biochemistry” in: Laboratory Techniques in Biochemistry and Molecular Biology, Vol. 17; Rehm et al. (1993) Biotechnology, Vol. 3, Chapter III: “Product recovery and purification”, pp. 469-714, VCH: Weinheim; Belter, P. A. et al. (1988) Bioseparations: downstream processing for Biotechnology, John Wiley and Sons; Kennedy, J. F. and Cabral, J. M. S. (1992) Recovery processes for biological Materials, John Wiley and Sons; Shaeiwitz, J. A. and Henry, J. D. (1988) Biochemical Separations, in Ullmann's Encyclopedia of Industrial Chemistry, Vol. B3; Chapter 11, pp. 1-27, VCH: Weinheim; and Dechow, F. J. (1989) Separation and purification techniques in biotechnology, Noyes Publications).

[0120] In addition to measuring the end product of the fermentation, it is likewise possible to analyze other components of the metabolic pathways, which are used for producing the compound of interest, such as intermediates and byproducts, in order to determine the overall efficiency of production of the compound. The analytical methods include measuring the amounts of nutrients in the medium (for example sugars, hydrocarbons, nitrogen sources, phosphate and other ions), measuring biomass composition and growth, analyzing the production of common metabolites from biosynthetic pathways and measuring gases generated during fermentation. Standard methods for these measurements are described in Applied Microbial Physiology; A Practical Approach, P. M. Rhodes and P. F. Stanbury, editors IRL Press, pp. 103-129; 131-163 and 165-192 (ISBN: 0199635773) and the references therein.

### Example 10

### Purification of the Product of Interest from a C. glutamicum Culture

[0121] The product of interest may be obtained from C. glutamicum cells or from the supernatant of the above-described culture by various methods known in the art. If the product of interest is not secreted by the cells, the cells may be harvested from the culture by slow centrifugation, and the cells may be lysed by standard techniques such as mechanial force or sonication. The cell debris is removed by centrifugation and the supernatant fraction which contains the soluble proteins is obtained for further purification of the compound of interest. If the product is secreted by the C. glutamicum cells, the cells are removed from the culture by slow centrifugation and the supernatant fraction is retained for further purification.

[0122] The supernatant fraction from both purification methods is subjected to chromatography using a suitable resin, and either the molecule of interest is retained on the chromatography resin while many contaminants in the sample are not, or the contaminants remain on the resin while the sample does not. If necessary, these chromatography steps can be repeated using the same or different chromatography resins. The skilled worker is familiar with the selection of suitable chromatography resins and the most effective application thereof for a particular molecule to be purified. The purified product may be concentrated by filtration or ultrafiltration and stored at a temperature at which product stability is highest.

[0123] In the art, many purification methods are known, and the above purification method is not intended to be limiting. These purification techniques are described, for example, in Bailey, J. E. & Ollis, D. F. Biochemical Engineering Fundamentals, McGraw-Hill: N.Y. (1986).

[0124] The identity and purity of the isolated compounds can be determined by techniques of the prior art. These techniques comprise high performance liquid chromatography (HPLC), spectroscopic methods, coloring methods, thin-layer chromatography, NIRS, enzyme assays or microbiological assays. These analytical methods are compiled in: Patek et al. (1994) Appl. Environ. Microbiol. 60: 133-140; Malakhova et al. (1996) Biotekhnologiya 11 27-32; and Schmidt et al. (1998) Bioprocess Engineer. 19: 67-70. Ulmann's Encyclopedia of Industrial Chemistry (1996) Vol. A27, VCH: Weinheim, pp. 89-90, pp. 521-540, pp. 540-547, pp. 559-566, 575-581 and pp. 581-587; Michal, G (1999) Biochemical Pathways: An Atlas of Biochemistry and Molecular Biology, John Wiley and Sons; Fallon, A. et al. (1987) Applications of HPLC in Biochemistry in: Laboratory Techniques in Biochemistry and Molecular Biology, Vol. 17.

[0125] Equivalents

[0126] The skilled worker knows, or can identify by using simply routine methods, a large number of equivalents of the specific embodiments of the invention. These equivalents are intended to be included in the patent claims below.

[0127] The information in Table 1 is to be understood as follows:

[0128] In column 1, “DNA ID”, the relevant number refers in each case to the SEQ ID NO of the enclosed sequence listing. Consequently, “5” in column “DNA ID” is a reference to SEQ ID NO:5.

[0129] In column 2, “AA ID”, the relevant number refers in each case to the SEQ ID NO of the enclosed sequence listing. Consequently, “6” in column “AA ID” is a reference to SEQ ID NO:6.

[0130] In column 3, “Identification”, an unambiguous internal name for each sequence is listed.

[0131] In column 4, “AA pos”, the relevant number refers in each case to the amino acid position of the polypeptide sequence “AA ID” in the same row. Consequently, “26” in column “AA pos” is amino acid position 26 of the polypeptide sequence indicated accordingly. Position counting starts at the N terminus with +1.

[0132] In column 5, “AA wild type”, the relevant letter refers in each case to the amino acid, displayed in the one-letter code, at the position in the corresponding wild-type strain, which is indicated in column 4.

[0133] In column 6, “AA mutant”, the relevant letter refers in each case to the amino acid, displayed in the one-letter code, at the position in the corresponding mutant strain, which is indicated in column 4.

[0134] In column 7, “Function”, the physiological function of the corresponding polypeptide sequence is listed.

[0135] One-letter code of the proteinogenic amino acids:

[0136] A Alanine

[0137] C Cysteine

[0138] D Aspartic acid

[0139] E Glutamic acid

[0140] F Phenylalanine

[0141] G Glycine

[0142] H Histidine

[0143] I Isoleucine

[0144] K Lysine

[0145] L Leucine

[0146] M Methionine

[0147] N Asparagine

[0148] P Proline

[0149] Q Glutamine

[0150] R Arginine

[0151] S Serine

[0152] T Threonine

[0153] V Valine

[0154] W Tryptophan

[0155] Y Tyrosine

TABLE 1
Genes coding for DNA replication and pathogenesis proteins

| | | | AA | AA | AS | |
|---|---|---|---|---|---|---|
| DNA ID: | AA ID: | Identification: | Pos: | wild type | mutant | Function: |
| 1 | 2 | RXA00050 | 66 | A | V | ATP-DEPENDENT RNA HELICASE DEAD |
| | | | 596 | G | S | ATP-DEPENDENT RNA HELICASE DEAD |
| 3 | 4 | RXA00061 | 754 | S | N | DNA POLYMERASE I (EC 2.7.7.7) |
| 5 | 6 | RXA00157 | 90 | V | I | INVASIN 1 |
| | | | 159 | G | R | INVASIN 1 |
| | | | 449 | G | D | INVASIN 1 |
| | | | 454 | S | F | INVASIN 1 |
| | | | 590 | S | F | INVASIN 1 |
| 7 | 8 | RXA00208 | 45 | G | E | VULNIBACTIN UTILIZATION PROTEIN VIUB |
| | | | 61 | D | N | VULNIBACTIN UTILIZATION PROTEIN VIUB |
| | | | 76 | P | L | VULNIBACTIN UTILIZATION PROTEIN VIUB |
| 9 | 10 | RXA00313 | 69 | E | K | 23S RRNA METHYLTRANSFERASE (EC 2.1.1.—) |
| 11 | 12 | RXA00341 | 254 | G | D | EXORIBONUCLEASE II (EC 3.1.13.1) |
| | | | 414 | D | G | EXORIBONUCLEASE II (EC 3.1.13.1) |
| 13 | 14 | RXA00407 | 187 | D | H | DNA POLYMERASE III, ALPHA CHAIN (EC 2.7.7.7) |
| 15 | 16 | RXA00694 | 34 | A | T | SSU ribosomal protein S8P |
| 17 | 18 | RXA00696 | 66 | T | I | LSU ribosomal protein L18P |
| 19 | 20 | RXA00807 | 62 | G | E | DNA POLYMERASE III, DELTA′ SUBUNIT (EC 2.7.7.7) |
| | | | 241 | R | C | DNA POLYMERASE III, DELTA′ SUBUNIT (EC 2.7.7.7) |
| 21 | 22 | RXA01238 | 156 | S | N | DNA POLYMERASE III, ALPHA CHAIN (EC 2.7.7.7) |
| 23 | 24 | RXA01280 | 43 | K | R | SSU ribosomal protein S12P |
| 25 | 26 | RXA01305 | 400 | L | F | ADHESIN AIDA-I |
| | | | 545 | S | F | ADHESIN AIDA-I |
| 27 | 28 | RXA01343 | 11 | A | V | LSU ribosomal protein L1P |
| 29 | 30 | RXA01480 | 297 | G | D | DNA PRIMASE (EC 2.7.7.—) |
| 31 | 32 | RXA01563 | 117 | P | S | RIBONUCLEASE D (EC 3.1.26.3) |
| | | | 375 | R | Q | RIBONUCLEASE D (EC 3.1.26.3) |
| 33 | 34 | RXA01581 | 274 | S | F | 23S RRNA METHYLTRANSFERASE (EC 2.1.1.—) |
| 35 | 36 | RXA01661 | 64 | G | D | RRNA METHYLTRANSFERASE (EC 2.1.1.—) |
| 37 | 38 | RXA01683 | 130 | R | C | DNA GYRASE SUBUNIT A (EC 5.99.1.3) |
| | | | 584 | S | F | DNA GYRASE SUBUNIT A (EC 5.99.1.3) |
| 39 | 40 | RXA01718 | 284 | P | S | CBS domain containing protein |
| 41 | 42 | RXA01736 | 236 | P | S | PUTATIVE ATP-DEPENDENT DNA HELICASE |
| 43 | 44 | RXA01770 | 243 | D | N | DNA HELICASE II (EC 3.6.1.—) |
| 45 | 46 | RXA01772 | 502 | S | F | Superfamily II DNA and RNA helicase |
| 47 | 48 | RXA01949 | 97 | S | N | LSU ribosomal protein L23P |
| 49 | 50 | RXA01966 | 46 | A | V | OLIGORIBONUCLEASE (EC 3.1.—.—) |
| 51 | 52 | RXA02070 | 150 | A | T | MRP PROTEIN HOMOLOG |
| 53 | 54 | RXA02082 | 726 | A | V | CHROMOSOME SEGREGATION PROTEIN SMC2 |
| | | | 781 | L | F | CHROMOSOME SEGREGATION PROTEIN SMC2 |
| | | | 905 | A | T | CHROMOSOME SEGREGATION PROTEIN SMC2 |
| 55 | 56 | RXA02145 | 321 | P | L | MENAQUINOL-CYTOCHROME C REDUCTASE CYTOCHROME B SUBUNIT |
| 57 | 58 | RXA02293 | 349 | A | V | ATP-DEPENDENT HELICASE HRPB |
| 59 | 60 | RXA02357 | 896 | G | E | PROBABLE ATP-DEPENDENT HELICASE LHR (EC 3.6.1.—) |
| | | | 1414 | T | I | PROBABLE ATP-DEPENDENT HELICASE LHR (EC 3.6.1.—) |
| 61 | 62 | RXA02363 | 728 | V | M | ATP-dependent helicase |
| 63 | 64 | RXA02533 | 142 | R | C | TRANSCRIPTIONAL REGULATORY PROTEIN |
| 65 | 66 | RXA02657 | 840 | H | Y | PROBABLE DNA POLYMERASE III, ALPHA CHAIN (EC 2.7.7.7) |
| | | | 1161 | D | N | PROBABLE DNA POLYMERASE III, ALPHA CHAIN (EC 2.7.7.7) |
| 67 | 68 | RXA03166 | 1183 | P | L | ATP-DEPENDENT HELICASE HRPA |
| 69 | 70 | RXA03266 | 103 | T | I | DNA POLYMERASE III, BETA CHAIN (EC 2.7.7.7) |
| | | | 364 | P | L | DNA POLYMERASE III, BETA CHAIN (EC 2.7.7.7) |
| 71 | 72 | RXA03332 | 52 | G | E | phage Hau3 resistance protein |
| 73 | 74 | RXA03341 | 153 | E | K | DNA-BINDING PROTEIN |
| 75 | 76 | RXA03590 | 398 | P | S | virulence-associated protein E |
| 77 | 78 | RXA03607 | 176 | R | K | Hypothetical phage protein |
| 79 | 80 | RXA03743 | 157 | S | F | DNA TOPOISOMERASE I (EC 5.99.1.2) |
| 81 | 82 | RXA03903 | 811 | E | K | DNA TOPOISOMERASE I (EC 5.99.1.2) |
| 83 | 84 | RXA04194 | 922 | R | C | ATP-DEPENDENT DNA HELICASE |
| 85 | 86 | RXA07017 | 574 | P | S | DNA POLYMERASE III SUBUNITS GAMMA AND TAU (EC 2.7.7.7) |
| 87 | 88 | RXA07018 | 1245 | L | F | DNA-DIRECTED RNA POLYMERASE BETA′ CHAIN (EC 2.7.7.6) |
| 89 | 90 | RXA07019 | 55 | G | S | LSU ribosomal protein L2P |
| 91 | 92 | RXA07020 | 314 | R | S | PHENYLALANYL-TRNA SYNTHETASE ALPHA CHAIN (EC 6.1.1.20) |
| 93 | 94 | RXA07027 | 256 | G | D | PHAGE INFECTION PROTEIN |
| 95 | 96 | RXA07028 | 27 | E | K | TYPE II RESTRICTION-MODIFICATION SYSTEM RESTRICTION SUBUNIT |
| | | | 310 | A | V | TYPE II RESTRICTION-MODIFICATION SYSTEM RESTRICTION SUBUNIT |

We claim:

1. An isolated nucleic acid molecule, coding for a polypeptide having the amino acid sequence referred to in each case in table 1/column 2, wherein the nucleic acid molecule in the amino acid position indicated in table 1/column 4 encodes a proteinogenic amino acid different from the particular amino acid indicated in table 1/column 5 in the same row.

2. An isolated nucleic acid molecule as claimed in claim 1, wherein the nucleic acid molecule in the amino acid position indicated in table 1/column 4 encodes the amino acid indicated in table 1/column 6 in the same row.

3. A vector, which comprises at least one nucleic acid sequence as claimed in claim 1.

4. A host cell, which is transfected with at least one vector as claimed in claim 3.

5. A host cell as claimed in claim 4, wherein expression of said nucleic acid molecule modulates the production of a fine chemical from said cell.

6. A method for preparing a fine chemical, which comprises culturing a cell which has been transfected with at least one vector as claimed in claim 3 so that the fine chemical is produced.

7. A method as claimed in claim 6, wherein the fine chemical is an amino acid.

8. A method as claimed in claim 7, wherein said amino acid is lysine.

The application's sequence listing, which the Patent Office published only in electronic form, follows.

SEQUENCE LISTING (96 sequences)

SEQ ID NO: 1 - DNA, 2326 bp, Corynebacterium glutamicum
  CDS (101)..(2296): RXA00050
agcaatgtcccattttccctgctcacctgtatgggcacccgcggcggaagtggaattgcatatggagttttgatgatatttagcgtaacttaaaggaacaatgagtaataccgagaacgtcaacggcgacgtagaacagccgaataacgtcatttcgtcggaatctcaggaaaccccgcagggtgactcagcatcagctgacttcgctctcgaaaccccaaccaacactgttgaagatgcaccagcatctgagggtagcgaagagatcaccagggttgcggatacttctgaggacgccgactctgcagatgcagacaacgcgagcaatgtaatcaatgagaatgaggactcctcggaaggtgctaaccagccttcaaacgagtcatcctctacggaagccaaatccggcttcgatgcactcggactgccagagcgtgttcttgacgctgtgcgcaaggtgggttacgaaactccttccccaattcaggcacaaaccatcccaatcctcatggagggccaggatgttgttggtctagcacagaccggtaccggtaagactgcagctttcgcgctgccaatccttgcccgtattgacaagtccgtgcgcagcccacaggcacttgtgcttgcccctacccgtgagctggcacttcaggttgctgactccttccaatccttcgctgaccacgtcggtggcctgaacgttctgccaatctatggtggacaggcttacggcattcagctctctggcctgcgtcgtggcgctcacatcgtcgtgggtaccccaggccgaatcatcgatcacctcgaaaagggctccctggatatctccggactgcgcttcctcgtgctcgatgaagcagacgagatgctgaacatgggcttccaggaagatgtcgagcgcatcctcgaggacaccccagacgagaagcaggttgcactattctccgcaacgatgccaaacggcattcgtcgcctgtccaagcagtacctgaacaaccctgctgaaatcaccgttaagtccgagaccaggactaacaccaacatcacccagcgcttcctcaacgttgcacaccgcaacaagatggatgcactgacccgtattctcgaggtcaccgagtttgaagcaatgatcatgttcgtgcgcaccaagcacgaaactgaagaagttgctgaaaagctccgtgcacgcggattctccgcagcagccatcaacggcgacattgctcaggcacagcgtgagcgcaccgtcgaccagctgaaggacggccgcctggacatcctcgttgcaaccgacgttgcagcccgtggtcttgacgttgagcgcatctcccacgtgcttaacttcgacattccaaacgacaccgagtcctacgttcaccgcatcggccgcaccggccgtgcaggacgtaccggcgaggcaatcctgttcgtgaccccacgtgagcgtcgtatgcttcgctccatcgagcgcgcaaccaacgcaccactgcacgaaatggaactgccaaccgtcgatcaggtcaacgacttccgcaaggtcaagttcgctgactccatcaccaagtccctcgaggacaagcagatggacctgttccgcaccctggtcaaggaatactcccaggccaacgacgttcctctagaggacatcgcagcggcactggcaacccaggcacagtccggcgacttcctgctcaaggagctcccaccagagcgccgtgagcgcaacgaccgccgtcgtgaccgtgacttcgacgaccgtggtggacgtggacgcgaccgtgaccgtggcgaccgcggagatcgtggctcacgcttcgaccgcgacgacgagaacctggcaacctaccgcctcgcagtgggcaagcgccagcacatccgcccaggcgcaatcgttggtgcacttgccaacgaaggtggcctgaactccaaggacttcggccgcatcaccatcgcagccgaccacaccctggttgaactgccaaaggatctcccacagagcgttcttgacaacctgcgcgacacccgcatctccggccagctcatcaacatagaacgcgactccggtggacgcccaccacgccgcttcgagcgcgatgaccgtggcggacgcggcggattccgcggcgaccgtgatgaccgcggtggacgtggacgtgaccgtgacgatcgtggaagccgtggaggtttccgcggtggacgtgaccgtgatgatcgtggcggacgcggtggattccgcggacgcgacgaccgcggagaccgtggtggccgtggcggttaccgtggcggacgcgactaagagttcgttttagcttcagctcaggtt

SEQ ID NO: 2 - protein, 732 aa, Corynebacterium glutamicum
MSNTENVNGDVEQPNNVISSESQETPQGDSASADFALETPTNTVEDAPASEGSEEITRVADTSEDADSADADNASNVINENEDSSEGANQPSNESSSTEAKSGFDALGLPERVLDAVRKVGYETPSPIQAQTIPILMEGQDVVGLAQTGTGKTAAFALPILARIDKSVRSPQALVLAPTRELALQVADSFQSFADHVGGLNVLPIYGGQAYGIQLSGLRRGAHIVVGTPGRIIDHLEKGSLDISGLRFLVLDEADEMLNMGFQEDVERILEDTPDEKQVALFSATMPNGIRRLSKQYLNNPAEITVKSETRTNTNITQRFLNVAHRNKMDALTRILEVTEFEAMIMFVRTKHETEEVAEKLRARGFSAAAINGDIAQAQRERTVDQLKDGRLDILVATDVAARGLDVERISHVLNFDIPNDTESYVHRIGRTGRAGRTGEAILFVTPRERRMLRSIERATNAPLHEMELPTVDQVNDFRKVKFADSITKSLEDKQMDLFRTLVKEYSQANDVPLEDIAAALATQAQSGDFLLKELPPERRERNDRRRDRDFDDRGGRGRDRDRGDRGDRGSRFDRDDENLATYRLAVGKRQHIRPGAIVGALANEGGLNSKDFGRITIAADHTLVELPKDLPQSVLDNLRDTRISGQLINIERDSGGRPPRRFERDDRGGRGGFRGDRDDRGGRGRDRDDRGSRGGFRGGRDRDDRGGRGGFRGRDDRGDRGGRGGYRGGRD

SEQ ID NO: 3 - DNA, 2845 bp, Corynebacterium glutamicum
  CDS (101)..(2815): RXA00061
aatcaattgcagaactaacccggttgtttccgagccagtctgaatgactgaaagcaatattagaccatcaatgattaggaatggaaattaggggtctggtttgggtgaatgtgtcgctaatttttccactcgcctacactcgggaggcgtgactgagaagactgaccagaccttaatgcttatcgacggccactcgatggctttccgcgcattctttgctttgccggctgagaatttctccacgtcgggcgggcaggccaccaatgctgtctatggctttctctcgatgctgtccacgttgttgaaggatgagcagcctactcatgtggcggtggctttcgatgtggggcgtaagacgttccgtaccgatatgttcccggcgtataaggcgcagcgtgaagcaacgccacctgagtttaagggccaggtggaaatcctcaaggaggtgttgtccactttgggaattacgactattgagaaaatcgattttgaggctgatgatgtgatcgccacgttgtctgtggcggcgaaacctttaggctttaagacgctgattgttacgggtgaccgtgattccttccagttggtcaatgacaccaccacggtgttgtatccgatgaagggcgtgtctgtgctgcaccgtttcacgccggaagcagtggaggagaagtatggactgacaccgaggcagtatccggagtttgcagcgctgcgtggtgatccttccgataacttgcctaatattcctggcgtgggcgagaagactgctaccaagtggattgcccagtatgaaactttggataatttgcttgatcacgctgatgagatcaagggcaaggttggcgccagcctgcgtgagcgcattgagcaggtccggatgaaccgcaagctcacggagatggtgaaggatctggagctgccgcttggtccggacgattttgagatgaagcctgtgcaggttgcggaggttgcggcgaagtttgacgatctggagtttggtaccaatttgcgtgagcgggtgctggcggtggtgaaggccgagggttccgctgcccccgtggaggaagtggaagcggaacaggttgtcgtcgatacgcaatctttggcgcaatggctgcctgctagggctggccaggcgcttgctttagcgctggctggagtggctaaacctgctgctggcgacacgtatgcgctagcgattgcggataccaagcgccatgcggtgttggttgatgtggctgatatttcagcggaggatgaaaaggcgctggccacgtggttggcgtcggaagatccaaagatgctgcacggcgctaaggccgcctatcatatgctcgctgggcgcggttttgagctgcacggcgtggtgcatgacacggcgatcgcggcatacttgctgcgtccgggccaacgcacctatgagcttgccgacgtctaccagcggcatcttcaacgacagttgtctacaaacgacaatggcggccagctcacgctgctcgacgcagctgatgaccaatcgcttgttgatgatgtcattgcaatccttgagctgtctgaagaattgaccaaacagcttcaggagattcaagcttttgagctttaccatgacctggaaattccgctgtcgggaattctggcgcgcatggaggccatcggtatcgctgttgatgttgccactttggaagagcagttgaagactttcattggtcaggttgctcaggaagaggaagcagctcgcgagctcgctgaggatccaaccctgaatctctcgagcccgaagcagctgcaagtggtgctttttgagacgttcggaatgccgaaaaccaagaaaaccaagaccggctactctacggctgccgcggaaattgaagccctagcgatcaagaatccgcacccattcctagatcacctgttggcacaccgtcagtaccaaaagatgaagaccactctggaaggtctcatccgtgaggtggctcctgatggccgtattcacaccaccttcaaccagacggtggcgtctacgggacgtttgtcatccactgatcccaacctgcaaaacattcctgtgcgcactgaggctggccgaaagattcgttcgggattcgtcgtaggcgaggggtatgaaaccttgctgactgccgactattcgcagattgaaatgcgcgtgatggctcacctttcccaggacccaggcttgattgaggcgtaccgcgaaggcgaagacctgcacaattacgtgggttccaaggtgtttaatgtgcccatcgatggcgtgacccctgagctgcgtcgccaggtcaaggccatgtcttacggtctggtgtacggcttgtccgcgtttggtttgtctcagcagctgagcattcctgctggcgaagcgaagcagatcatggagtcctacttcgagcgcttcggcggagtacagcgctacctccgggagatcgtggaggaggctcgaaaagctggctacacggaaacgctgtttgggcgtcgtcgctacctgccggaactgacctcggataaccgtgtcgctcgtgaaaacgctgaacgtgccgcactgaacgccccgattcagggaactgccgcagacatcatcaaggtggccatgatccgggtggaccgttcactcaaggaagctgccgtgaaatctcgcgtgctgcttcaggtgcatgatgaattggtcgtggaagtagcggccggtgagttggaacaagtccgtgagattctggaacgcgaaatggataacgccatcaagctgtccgttcctttggaagtttcagctggtgatggcgttaactgggatgctgcagcgcactaagaggtaactgccttttcgtcgacgagc

SEQ ID NO: 4 - protein, 905 aa, Corynebacterium glutamicum
LGECVANFSTRLHSGGVTEKTDQTLMLIDGHSMAFRAFFALPAENFSTSGGQATNAVYGFLSMLSTLLKDEQPTHVAVAFDVGRKTFRTDMFPAYKAQREATPPEFKGQVEILKEVLSTLGITTIEKIDFEADDVIATLSVAAKPLGFKTLIVTGDRDSFQLVNDTTTVLYPMKGVSVLHRFTPEAVEEKYGLTPRQYPEFAALRGDPSDNLPNIPGVGEKTATKWIAQYETLDNLLDHADEIKGKVGASLRERIEQVRMNRKLTEMVKDLELPLGPDDFEMKPVQVAEVAAKFDDLEFGTNLRERVLAVVKAEGSAAPVEEVEAEQVVVDTQSLAQWLPARAGQALALALAGVAKPAAGDTYALAIADTKRHAVLVDVADISAEDEKALATWLASEDPKMLHGAKAAYHMLAGRGFELHGVVHDTAIAAYLLRPGQRTYELADVYQRHLQRQLSTNDNGGQLTLLDAADDQSLVDDVIAILELSEELTKQLQEIQAFELYHDLEIPLSGILARMEAIGIAVDVATLEEQLKTFIGQVAQEEEAARELAEDPTLNLSSPKQLQVVLFETFGMPKTKKTKTGYSTAAAEIEALAIKNPHPFLDHLLAHRQYQKMKTTLEGLIREVAPDGRIHTTFNQTVASTGRLSSTDPNLQNIPVRTEAGRKIRSGFVVGEGYETLLTADYSQIEMRVMAHLSQDPGLIEAYREGEDLHNYVGSKVFNVPIDGVTPELRRQVKAMSYGLVYGLSAFGLSQQLSIPAGEAKQIMESYFERFGGVQRYLREIVEEARKAGYTETLFGRRRYLPELTSDNRVARENAERAALNAPIQGTAADIIKVAMIRVDRSLKEAAVKSRVLLQVHDELVVEVAAGELEQVREILEREMDNAIKLSVPLEVSAGDGVNWDAAAH

SEQ ID NO: 5 - DNA, 2020 bp, Corynebacterium glutamicum
  CDS (101)..(1990): RXA00157
tttccgctacggaacgcggagtctttacgtttcaattcttggcaagtatctagcgtcaaggcttgatatgtgaagggattcggattgaacaggagaacatgtggccaatctagattcagttcgccctggggtgcgggcagctcttcgacgtacccatacccaggtaaaaggtgtcacgttgaccagggcgttgattgcgcttgcagtaagcggagctttgcttagttccatgactccggcggtggcgcagccacagaatccggatgacgcagccattgcacaggcagaggaaaatgtttcggcgggcgatggggaagtcgcccgcctggcaggatctttgtccagcactgacgcggaaattaaccgcgtcgagctggaaatgggtgctctgcgtgaagaagtgaacaagtccctcgtggatttgcatgatgcgcaggcaatcgccgagcaggcccgccaagatgcacttgcagccaagaaggatctcgatgattctcaagcgcagatcgaagcagcccaagagcgccttgatgagatttcacgtgcagcgtatcgccaaaacggaacctccaaggggctttcaggcatctcgggcaatggaaattctgaagatgcgctagatcgtcagacttacctgcgaaccagtgcggaaaagcagcaggcagctgttgaagagcttgatcgcctccgtacggaaaacgccaacaaggaatcggtgttgcgccaggcccgcatcgttgctgagcagcgtgaggcggaagccgtcgaaaagcaagtccagaccgaggctgcaattgccgcaaacagcgagcagctcaatgtcttgactaacaatcgcagtaccttggttgcccagcgtgatggggctgagcgcaacttggccatcgctcgtgcgcaggcggataatctgcaaggtcagcgtgctgagtacgaggaattccagcaggcagagcaggctcgcatccaggcggaagcggaagctcaggctgctgcggaggagaagcgtcgtgccgatgaggctgctgcacaggcagccgctgaagctcaagaagctgcccagcaagctcaggcggcggaggaagcccaagccgcgcaagcagctgagacagcacaagcccaagccgcgcaagctgcggaaacccaagctgcacaagccgcgcaagctcaggcagaagcgaatgatcgtgccgccgcgcaacagcgtgctgcagaggctcaagcagcagcggaacaggcgcaacgtgaggctgacgctcaggcggccaacgatgcccaagctcaggcactgcgtgaacaggcgctcaccgcagcctccatcgctgcggctgctctaattgcggcgagccagtccagccatgccactactcaaaatccttacccaactgatgaagacgcggatccgaccgatattgcggacatccaaggcccaacgcagccaggtacgggtgagtctggagattcccagagcaactccagcgacaacgattccacaggcaacgattccacaggctctgactcttcagattcagattcctccggcaacgattcttcagaggttatttccggcgatcgttccgctcagattgagactgtgattgcgcgcgccatgagccagttgggtgtgcagtacgcatggggtggcggtaacgctaatggcccaactctgggtatccgtgacggtggcgtggcggactcttacggcgattacaacaaggttggcttcgactgctctggactgaccttgtatgcgtttgcgggtgtgggaatttcacttcctcactacacgggctaccagtaccagcacggcaccaaggtgtcgccttctgagatgcaacgtggcgatctgatcttctatggtccgggagcgtctcagcacgtggcaatttacctcggtgatggtcagatgattgaggctccgaattcgggttctgtcgtgaagatttctcctgttcgctggagcggaatgaccgagagcgtggtacgcctcatttagtttcctcctatgaatcttgatgtggtt

SEQ ID NO: 6 - protein, 630 aa, Corynebacterium glutamicum
VANLDSVRPGVRAALRRTHTQVKGVTLTRALIALAVSGALLSSMTPAVAQPQNPDDAAIAQAEENVSAGDGEVARLAGSLSSTDAEINRVELEMGALREEVNKSLVDLHDAQAIAEQARQDALAAKKDLDDSQAQIEAAQERLDEISRAAYRQNGTSKGLSGISGNGNSEDALDRQTYLRTSAEKQQAAVEELDRLRTENANKESVLRQARIVAEQREAEAVEKQVQTEAAIAANSEQLNVLTNNRSTLVAQRDGAERNLAIARAQADNLQGQRAEYEEFQQAEQARIQAEAEAQAAAEEKRRADEAAAQAAAEAQEAAQQAQAAEEAQAAQAAETAQAQAAQAAETQAAQAAQAQAEANDRAAAQQRAAEAQAAAEQAQREADAQAANDAQAQALREQALTAASIAAAALIAASQSSHATTQNPYPTDEDADPTDIADIQGPTQPGTGESGDSQSNSSDNDSTGNDSTGSDSSDSDSSGNDSSEVISGDRSAQIETVIARAMSQLGVQYAWGGGNANGPTLGIRDGGVADSYGDYNKVGFDCSGLTLYAFAGVGISLPHYTGYQYQHGTKVSPSEMQRGDLIFYGPGASQHVAIYLGDGQMIEAPNSGSVVKISPVRWSGMTESVVRLI

SEQ ID NO: 7 - DNA, 979 bp, Corynebacterium glutamicum
  CDS (101)..(949): RXA00208
cggccaattttttcttttgtgggggtgcctcttacgcatttcctgaatttttgttaggcttgcctaggtcagttaaagatatatcgataagaggttttccatgaacactccagcgccccgcaaacgacgcgaaatgaaaatcaagacagcaaccgtcactggtgtgcgtcaaatttcccccgatctcatccgcttcagcttcgactgcccagaaatcgttggcgccgacctggggttcacggaccattacatcaagatcctcttcgtgccagcaggtgcggattactcctggcctttcgacatggcagaaattgcggaaacccagccccgtgagctgcaaccagtgcgccgcacctacactttccgcacggttgacactgtcgcaggcacatttgacatagatttcgttgcgcacggcaccgatggccttgccggtccttgggcgcagcaggcacaggtaggtgatgtcatcgcgttcggcggcccaggtggcgcatggaagccagaaaccacctatgagcactacgttctcgcaggcgatgaagccgcagcacccgcaattttcgcagccttagaacacctacccgccggcaccaccgccaaagccttcattgaaatctcctccaacgaagcgcgtttcaacgccccagccagcgacaacatcgaggttgtctgggtgccccgcgacggcgccacccacggtacattgcttatcgacgccctccgccaggacggctacccaaccaagaaaacttcctggttcatccacggagtcgccgaaatggtgaaggaaacccgcaaattcctcttcgtggaaggcaacgtagacaaagctgatgcatccatttccggatactggcgccttggcatgaccgaagaccagtggcaggcctccaagcgggagttcaatgagcaaaatgaggcagaagaactcgcgctcagcaaggcataagggcaaggggttctagaaagaccaacg

SEQ ID NO: 8 - protein, 283 aa, Corynebacterium glutamicum
MNTPAPRKRREMKIKTATVTGVRQISPDLIRFSFDCPEIVGADLGFTDHYIKILFVPAGADYSWPFDMAEIAETQPRELQPVRRTYTFRTVDTVAGTFDIDFVAHGTDGLAGPWAQQAQVGDVIAFGGPGGAWKPETTYEHYVLAGDEAAAPAIFAALEHLPAGTTAKAFIEISSNEARFNAPASDNIEVVWVPRDGATHGTLLIDALRQDGYPTKKTSWFIHGVAEMVKETRKFLFVEGNVDKADASISGYWRLGMTEDQWQASKREFNEQNEAEELALSKA

SEQ ID NO: 9 - DNA, 1069 bp, Corynebacterium glutamicum
  CDS (101)..(1039): RXA00313
gatcgtcttgccgatgctggtattgaggttgtggataccgcagatggcgctacatggaaattgcagtaattacagacacttttaaggagataatttaaacatggcaggaaatgacagtcgtcgaggcggcttacgcaagaccaataaaaaaggtgcaaccaagggcagtggcggacaggttcgtcgcggtctgaaaggtaaggggcctacccctaaagctgaggatcgcacctatcacgcagctcacaagcgcaaggtggagcgtgatcgtcgtgatcgtggacgccaccagcgtgaaatgccagagttggttgtgggccgtaacccagtgctggaatgtctgcatgcacgcgttccagcgactgctttgtatgttgcagagggtgcggcgaacgatgagcgtctgagcgaggcagtgcacactgcggctggccgaaatcttccagtgctggaggttaacaagctggagctggatcgtatgaccggcaacggcatgcaccagggcatcggcctggcgatccctccttacgagtacgcagatgttcatgatctgatcgccaatgctgcggcttctaagaagccaggcatgttcgtgattctggataacatcaccgacccacgtaacttgggtgctgtgattcgttccgtcggtgctttcggcggcaacggtgtcatcattccggagcgtcgttcagcatctgtgaccgctgttgcatggcgtacttctgctggtaccgcagcgcgtgtgccagtggcgaaggaaaccaacatgactcgtgtcgtgaaggaattccagcaaaacggttaccaggtcgtcggccttgacgctggcggcgaccacactttggacacctacgacggcaccgacaacgttgtcatcgtcgtcggttctgagggcaagggaatttcccgtctcgttcgcgaaaactgcgacaccatcatgtccatacccaccgagggctgggttgaatcgctgaacgcttcggttgctgccggcgtcgtgctgtcggagttctcgcgccagcgtcgcattaagggttaagccggaggttggcgtcgaaaagccaaa

SEQ ID NO: 10 - protein, 313 aa, Corynebacterium glutamicum
MAGNDSRRGGLRKTNKKGATKGSGGQVRRGLKGKGPTPKAEDRTYHAAHKRKVERDRRDRGRHQREMPELVVGRNPVLECLHARVPATALYVAEGAANDERLSEAVHTAAGRNLPVLEVNKLELDRMTGNGMHQGIGLAIPPYEYADVHDLIANAAASKKPGMFVILDNITDPRNLGAVIRSVGAFGGNGVIIPERRSASVTAVAWRTSAGTAARVPVAKETNMTRVVKEFQQNGYQVVGLDAGGDHTLDTYDGTDNVVIVVGSEGKGISRLVRENCDTIMSIPTEGWVESLNASVAAGVVLSEFSRQRRIKG

SEQ ID NO: 11 - DNA, 1645 bp, Corynebacterium glutamicum
  CDS (101)..(1615): RXA00341
cgggaatgtggtgagtccttgatcagtaaacctgcagaaatcacatttgccccaccagtcccaaaatggaaccctctcagaatcgcttttaacgggctaaatgagctcgacccataccaagacctatctggggaacctcgacccttctgtgcccaaggaaactcaacacccctgcatatacttttccgctgtggaacaatgggagcgcatgaagctctatgcagcagtcctcgactttgaaccagtggcacaagagttcggtgtggagcgaggttttgaccctcatatccacgacgaagccgcgtcaagtgtcgataggtatgcgcaagagcgggaagatctcctgcacatgccctttgtcaccatcgatcccgtaggttccagagacctcgatcaagctgtgctgattgaggagatcgacagcggatttcgggtgcattacgcgattgcagatgtcgcagccttcgtggagccgggcagtgaattggaaaagatttcccttcaccgcgggcagactatttatctgccggattccccagcgcgactgcaccctgaggaattatccgaagatgcggcaagcctgctggagggacaaacgagaccagcggttgtgtggtcgattgatctagatgaacgtggcgaagtcacagccaccaaggtgcgtcgcgggttggtgaaatcccgggcgcgtttggattatgatcaggctcaaatagatgccgagaatggtcggttgcatccgtcgataagcttattgcccaaggtcgggcagctgaggcaggaaagcgcgctacggcgcgaagccgtgaatctttctattcccagccagcgagtggtgaaagtgcccaatgatgacgccggtgaacactatgaaattgtcatcgagccacgcccgcacatcatggattacaattccgagatttccctgctcacaggcatggtagcgggggagatgatggtgaaagcggggcacggtttgctgcgtacactcgccccggcgaccaaagaatccgaagctactttcagatcagaggcgcaagcccttggttttgagatcgcgcccgaacaacccatcggtgagtttcttcaaagtgtggatcccaatacgcccaaagggatggccattcagagggaagcacagaaactcttgcggggctccggctacgccagcgtgaaaaatggggactcggaagtgcattccggtgttggtggttactatgctcacgtcaccgcaccgctgcgccgacttatcgaccgtttcgccaccgaacattgccttgcgattgcctccggaacggacgttcctgaatgggtgaccagggtggaagagcaagttctcgacaccatgaaatactcctccattttggccagccaagtggataatgcctgcctcgacctcacagaagccaccgtgttgaaatactgggagggccaaaacttcaacgcggtggttgtagcgagcgaacctgaaaagaactctgctcgactttttgtgtacaaaccgccagtgttggcaaagtgtattggcgccccagaacagggaacaaaccaagatgtcacactggtgactgcgaacttgaagaagcgtgaagttttgtttgcgtggccggctgactaagcatgcaggctggttaagtaggcgtgc

SEQ ID NO: 12 - protein, 505 aa, Corynebacterium glutamicum
MSSTHTKTYLGNLDPSVPKETQHPCIYFSAVEQWERMKLYAAVLDFEPVAQEFGVERGFDPHIHDEAASSVDRYAQEREDLLHMPFVTIDPVGSRDLDQAVLIEEIDSGFRVHYAIADVAAFVEPGSELEKISLHRGQTIYLPDSPARLHPEELSEDAASLLEGQTRPAVVWSIDLDERGEVTATKVRRGLVKSRARLDYDQAQIDAENGRLHPSISLLPKVGQLRQESALRREAVNLSIPSQRVVKVPNDDAGEHYEIVIEPRPHIMDYNSEISLLTGMVAGEMMVKAGHGLLRTLAPATKESEATFRSEAQALGFEIAPEQPIGEFLQSVDPNTPKGMAIQREAQKLLRGSGYASVKNGDSEVHSGVGGYYAHVTAPLRRLIDRFATEHCLAIASGTDVPEWVTRVEEQVLDTMKYSSILASQVDNACLDLTEATVLKYWEGQNFNAVVVASEPEKNSARLFVYKPPVLAKCIGAPEQGTNQDVTLVTANLKKREVLFAWPAD

SEQ ID NO: 13 - DNA, 3295 bp, Corynebacterium glutamicum
  CDS (101)..(3265): RXA00407
agtatttaggagattagcaccatagaccgcgatctgtacagcttggtctatttccttctccggctggcgtggaaaacttattggaaaatttgttctaaaaatgtatcctatcattatggaatggaatggcgggggaagctttaacggcaggccattatcgtggtccaaattggaaagaatcctctcaggtaaaaaggtcgaatctctgcgtccggtgctgcatgagccggatgcgcaggcgccttcatctgccatgcagggggaagcgtcggttccttttgccgagctgcatgccaccagcagttataactttctcactggcgcatcggatccgtctgatgtggttgtgcaggccaaaaagttaggacttgttgctctatcagtcatggatagggatggtttttatggtgcagtgagatttgcggaagctgccgcggaagctggaatgcataccgtttatggtgcggagctgagtctgcaagaaggcgtgttgacagtcttgtgtaaaaatccggaaggctacaaaaagctcagtcacctgatcagtgacgcgaaaatggcaacgggagaaaagggggaagttcgctatccgccgctgccaatggttgctgaacatgctgcaggggattgggtggtccttgcaggttttcagtggttggacaaaatcgactatgtgatcgattgctttaaaccggaaaatattgtgctggaattcggttcaaccatgacaccggaagacgccgaccgcaatgaatacctcagaagaacgcaagccaaattccagcttcgaggcatcctaagcaccaacccagaatccgctgcccgggggagcgtgcggcttgccggcgccaagcaggcactagcccgcaagatgccgcttgccgacgccgaaagcgagctacatcccatgggcactacctggatgcgcagcggggatacattgttaaaagcacaccctgattacgcggatctcattgcaaccacggtggaattagctgctgaatgtgctttcaccctagatttggtggccccgaatctgcccaagtgggatacccctggtgaacacacggaaatgtcctggcttgcgcacctggtttccactcggattgatacccgctatgtggggcgctccgcagacatcaaagcacgagctgccacacaaattgactatgaattaggcgttattgaaaagctgggttttccaggctatttcctcgtcgttaatgatctggtggagttttgtcgcgattccaatattttgtgccaaggcagaggttccgcggcgaactcggcggtgtgctttgtcctaggcatcaccaacgcggagccgatctctgctggattgttgtttgaacggtttttatctcctgaccgggatggtccaccagatattgacattgatattgaatccggcaggcgcgaagaagtaatccaatacgtgtatgaaaaatacggaagggataacgcagctcaagtagccaatgtcattacctaccgaacaaaaggcgcgatgcgtgatgctgcccgtgcactgggttacccgcaaggtgctgccgatgcctgggctaaaggaacctcggaaccacccgatgatgtgctggaattagctgcgcaatttaaagggcaaccacggcatttgggtattcactccggtggcatggtcatttgcgatcgccccatcgccgatgtggtgccagtggaatgggctcggatggataaccgctcggttgtgcaatgggataaagatgactgtgccacggcaggcttggtcaaattcgaccttttgggattgggcatgttggaagccatccatcacatgctggatctggtggcagaacaccgaggtaaaaagatcaatttgtgggaactagatctggcggaaccggaggtctatgacatgttgtgcaaggcagatgccgtgggtgtgttccaggtggaatcacgtgcgcagttatccacgctgcctcgactcaagccccgcaccttctttgacctggtcgtggaggtagctctgattcgtccaggtcccatccaaggcggatcggtgcacccgtatttgcggcgccgtgctggtgaagaggccatcacttatgaccaccccgtgttggaaaagtctttgggtaaaaccttaggaatcccactgtttcaggaacagctcatgcaggtagctgttgatgctgcaggttttagtggtggggaagcggattccttgcgcagagcgatggggtcgaaacgctcacctgaacgcatggctgcgttgcgctcgcggtttttccaagggctgaaagataccaatgggattgtgggggagaccgccgagaaactgtggaacaaaattgtggcctttgctgcctacggttttccggaatcgcattcgcagtcgtttgcgtccttggtgtatttctccgcgtggtttaaataccactacccggctgaattctgcgtgggattattgcgggcacaacccatgggtttctattcaccacagtctttgatcagtgatgccagacgccacggcgtgagtatcctgccgatcacggtcaatgattccggtgtggaggccgatgctccgaatggtgcgattcgattggggctcaacctggtgaaaggccttggccacgatgccgcgcaaagaatagaggacaacgccccgtttgattccattccggatttatcgcgccgggctgatcttaatgttgctcaagttgaggcattggcgcgagcgggagcggtggactgcttgggggtcggacgtcgacaagcattatggcaagcgggcgtcgcagcgaccgaaaaacctggaatgctgcctggcctttcggtgattgaagctccggcgttgccggggatgagcgcctttgagctgatggcgaccaatatttccgccacgggagtcaccgcggattatcagccgatggcgttgattcgggagcggatggaggagctggggatcgtgccggcggatcggctattggaggtggaagatggcacgcggctgcggatcgctggcattgtcacgcaccggcagcgcccgcaaactgcgtcggggctgacatttttagggatggaggatgagaccgggctgatgaatgtgatggtgtccgttgggttgtggcagcggcagcgcgtgctggccagaaatgccaaggcgttgattattcgagggattgtgcagaatgcgcaaggggtggcgacagttgtcgctgaccggttggaaccgttggacatgggggagtttctcagccgtggctcacgagattttcgataatttggcaaagtggacattatgacaaat

SEQ ID NO: 14 - protein, 1055 aa, Corynebacterium glutamicum
MYPIIMEWNGGGSFNGRPLSWSKLERILSGKKVESLRPVLHEPDAQAPSSAMQGEASVPFAELHATSSYNFLTGASDPSDVVVQAKKLGLVALSVMDRDGFYGAVRFAEAAAEAGMHTVYGAELSLQEGVLTVLCKNPEGYKKLSHLISDAKMATGEKGEVRYPPLPMVAEHAAGDWVVLAGFQWLDKIDYVIDCFKPENIVLEFGSTMTPEDADRNEYLRRTQAKFQLRGILSTNPESAARGSVRLAGAKQALARKMPLADAESELHPMGTTWMRSGDTLLKAHPDYADLIATTVELAAECAFTLDLVAPNLPKWDTPGEHTEMSWLAHLVSTRIDTRYVGRSADIKARAATQIDYELGVIEKLGFPGYFLVVNDLVEFCRDSNILCQGRGSAANSAVCFVLGITNAEPISAGLLFERFLSPDRDGPPDIDIDIESGRREEVIQYVYEKYGRDNAAQVANVITYRTKGAMRDAARALGYPQGAADAWAKGTSEPPDDVLELAAQFKGQPRHLGIHSGGMVICDRPIADVVPVEWARMDNRSVVQWDKDDCATAGLVKFDLLGLGMLEAIHHMLDLVAEHRGKKINLWELDLAEPEVYDMLCKADAVGVFQVESRAQLSTLPRLKPRTFFDLVVEVALIRPGPIQGGSVHPYLRRRAGEEAITYDHPVLEKSLGKTLGIPLFQEQLMQVAVDAAGFSGGEADSLRRAMGSKRSPERMAALRSRFFQGLKDTNGIVGETAEKLWNKIVAFAAYGFPESHSQSFASLVYFSAWFKYHYPAEFCVGLLRAQPMGFYSPQSLISDARRHGVSILPITVNDSGVEADAPNGAIRLGLNLVKGLGHDAAQRIEDNAPFDSIPDLSRRADLNVAQVEALARAGAVDCLGVGRRQALWQAGVAATEKPGMLPGLSVIEAPALPGMSAFELMATNISATGVTADYQPMALIRERMEELGIVPADRLLEVEDGTRLRIAGIVTHRQRPQTASGLTFLGMEDETGLMNVMVSVGLWQRQRVLARNAKALIIRGIVQNAQGVATVVADRLEPLDMGEFLSRGSRDFR

SEQ ID NO: 15 - DNA, 526 bp, Corynebacterium glutamicum
  CDS (101)..(496): RXA00694
cgactattgagttcggtgagcgttgagtggccagaaaacacacggttaacgtccaaggtgggaagggaaccccaacgagaaaggcatcaggtcgtctctaatgacaatgactgatccaatcgccgacatgctgtcgcgcgtgcgcaatgctagcaatgcgcaccacgacaccgtgtccatgccatcctccaagatcaaggcaaacatcgccgagatcttgaagcaggaaggctacatcgctaactacaccgttgaggatgcaaaggtcggcaagaccctgtccctcgagctgaagtacagcaacacccgtgagcgctccatcgctggtctgcgccgcgtttccaagcctggtctgcgtgtatacgctaagtccaccaatctgccacaggttctgggcggccttggcgtggctatcatttccacgtcacagggcctcctgaccgaccgtcaggctaccgagaagggcgtaggcggagaagtcctcgcctacgtctggtaatagggaggattgactaaatatgtcacg

SEQ ID NO: 16 - protein, 132 aa, Corynebacterium glutamicum
MTMTDPIADMLSRVRNASNAHHDTVSMPSSKIKANIAEILKQEGYIANYTVEDAKVGKTLSLELKYSNTRERSIAGLRRVSKPGLRVYAKSTNLPQVLGGLGVAIISTSQGLLTDRQATEKGVGGEVLAYVW

SEQ ID NO: 17 - DNA, 532 bp, Corynebacterium glutamicum
  CDS (101)..(502): RXA00696
gatccgccgcctgcgtaaggacgatccttacaagggtaagggcatccgctacgagggtgagcagatccgccgcaaggtcggaaagacgggtaagtaagcaatgagcaacactgaaaacaagcagaagcgcgtttccgttggcaaggacatcgcgactcgtcgtcgcgttgcccgtgcacgccgccacttccgcatccgcaagaacctgcgtggcaccccagaggctccacgtttggttgtccaccgctcttctcgccacatgcacgttcagatcatcgatgacgttgcaggccacaccctggctgcagcttcttccatcgaggctgaggttcgcgcaactgagggcgacaagaaggctaagggcgcaaaggtcggtcagctgatcgccgagcgcgctaaggctgctggtatcgagcaggtcgtcttcgaccgcgctggttacaagtaccacggccgcgttgcagctctcgctgacgccgctcgtgaaggtggtctgaaattctaatgatgaccatttctaagaacatcaacg

SEQ ID NO: 18 - protein, 134 aa, Corynebacterium glutamicum
MSNTENKQKRVSVGKDIATRRRVARARRHFRIRKNLRGTPEAPRLVVHRSSRHMHVQIIDDVAGHTLAAASSIEAEVRATEGDKKAKGAKVGQLIAERAKAAGIEQVVFDRAGYKYHGRVAALADAAREGGLKF

SEQ ID NO: 19 - DNA, 1372 bp, Corynebacterium glutamicum
  CDS (101)..(1342): RXA00807
tgctctaagcaatcgactcatgctcaatactctaacgtgccggtgcgacatcgcgaggatgtagtgaggaagtagtgtagagatcgtgactaattcgagtgtgtttgacagtctcgccggctccaaaacagtgtccaagacgcttttcgacgcggcctccagcgcgcgtgcccttgtccgcgcccgaaccacagaacgtgcccgcgcccgggcagaacaccaaaaccctgcaatgatccacgactccggctttgcccagtcatggctgtttacaggccctcccggatcgggacgttctgtggcagccaaggttttcgccgctacgctcgtatgttcgaatccggatgttgtgggctgtggacaatgcgaggattgccgcgccgccatgggaggcagccaccccgatattgaacacatcgtcccgcagcaattgtctatcggtgttgatgcagctagagaggtcatcaaagccgcagcggtcagtcctgttgcaggaaactggcgagtcgtcatcttcgaaaacgccgaccgactcaccatgcaagccgccaacgccttgctgaaaaccgtggaggaaccaaccgaaagcaccgtgatgattctgtgcgcacccaccacagacccccgcgacattgcgatcaccctccgctcccgctgcaggcacctctacattcccaccccctccatcgcggaagtcgcacgaatcctcgtagctgaaggcaacgtcagccaagcggatgcagaattagcggcggctgcctcaggcgctcacatcggcagggctcgatacttagcgcacaacaacgccgcccaacgcagacgcgccagcatcctcaacctggccgaattaatcttccacggtgatgtcgccttccgctccgtaaacaccttggtcaaaatggtggaaaccgaagccaaagacagcaacaaagaaaaagaagaagccgaactcgaagccgtaagaatctcactcggcatgggggccaaaggcaaaggtgtccacaaagcagtacgtggaggagcgggagatttcaaagcactcgaagaccaacaaaaactccgacgcacccgattcctccgcgacagcctcgacctcgcactcgtcgacctagccggcatctaccgcgatgccatcatcatttcctcccaagcccaagtcggactcacacaccccgatatggaaggcctctcccaagaactcgcaacaaaagtaagccaagaaggactcctggcatgcctcgacgcgatctccaaatgccgcgaatccttcggcttcaatgtacgacccatcgtggccatggacgccctggtaggacgcctgcgcaaagcctacaaagtgtcctaaacaccccaaattattgaagtcaagaac

SEQ ID NO: 20 - protein, 414 aa, Corynebacterium glutamicum
VFDSLAGSKTVSKTLFDAASSARALVRARTTERARARAEHQNPAMIHDSGFAQSWLFTGPPGSGRSVAAKVFAATLVCSNPDVVGCGQCEDCRAAMGGSHPDIEHIVPQQLSIGVDAAREVIKAAAVSPVAGNWRVVIFENADRLTMQAANALLKTVEEPTESTVMILCAPTTDPRDIAITLRSRCRHLYIPTPSIAEVARILVAEGNVSQADAELAAAASGAHIGRARYLAHNNAAQRRRASILNLAELIFHGDVAFRSVNTLVKMVETEAKDSNKEKEEAELEAVRISLGMGAKGKGVHKAVRGGAGDFKALEDQQKLRRTRFLRDSLDLALVDLAGIYRDAIIISSQAQVGLTHPDMEGLSQELATKVSQEGLLACLDAISKCRESFGFNVRPIVAMDALVGRLRKAYKVS

SEQ ID NO: 21 - DNA, 1531 bp, Corynebacterium glutamicum
  CDS (101)..(1501): RXA01238
ccacgtccagaatcttcttgaattccccggcgcgcttaaatgatgtccaccccacctagtagggtggtgtccattgattcagatcgaaaggaccacacctgtgatcgcggcttacggcgcatccatctctttggatgattccaccctcaccatctcttattcccctcttcttgctgctctttctaagtccagcgcacaatcggaatcggttgatctgacacaggtctctggagtatctgtgcaggatcccactgcttttactcacggctttttaaacctggagggcgtggataaatccatcgcctttgccccaaatagttcggcagatttagctgcgctggcagctgatattgatgctgtgttgaagggtgaaaagccacagcacctgggtggcggagccccagtagtgccttcagctccatctactgttgctggtctgaatttcgtgggctttgacgtagagacggccaatgatgattggggttccatctgccagattggtttggtcaagtacgtcgatggtgtggaggaatcttcggagtcatggttgtgtactcctcctgagagcctgaatttcttcaatgagatcaacattggtattcacggcatcaccccagagatggttgctgatcagcctcgttttgcagaccttgtgcccaagatggtggagttcgttggggatttgccgttggttgctcacaatgcgcagtttgatttcaccgcattgtcgcgcgcgtgtgctgcctcagggatcgatgtcccagagatgatttatggctgctcgttgacgttggcacgcaatgagaagctgcaggtggaaaaccataagcttccaacggtggctagtcatttagggtttgagctgaaaaaccaccacgatgctgctgaagatgctcgcgcgtgtgctgcgattaccattgcgttggcaaagcgccacagctttgagggcagctttgtggatttcgttcacagccgtggtttcaccatgggaaccgtggataacgcccgggtgtatccggtgctgaaggatcgttctggagctaacgttgcgttgcagcgtcgaaactttggtttggatgcaggcaagaccgaagtccccgtgcagccagctgttgatccagcgtgggaaaccccgaaggcggagccaaaaaagcaatctggccgccgtgcaccgtgggacaaggtggctacccctgaggtcattccagatcccaatcccgatgctgatccgtcgagcattctctatggccagaatgtgaccttgactggtgatttcgagccatatgaaaagggtgcgctgtggcagcggatcgctgatcaaggtgcgctgatcggtaagaacgtgactaagaagaccaccattttggttgctggcccgtgggcaacgattaccagtaagcaaaaacgtgctgaggagttgaaagaaaaaggacaggacatccagatctgggatgaaaagcagctgtttacggctctggggttagatgaacagcccccgttttaaaagaattttctaaaactcgggaacctt

SEQ ID NO: 22 - protein, 467 aa, Corynebacterium glutamicum
VIAAYGASISLDDSTLTISYSPLLAALSKSSAQSESVDLTQVSGVSVQDPTAFTHGFLNLEGVDKSIAFAPNSSADLAALAADIDAVLKGEKPQHLGGGAPVVPSAPSTVAGLNFVGFDVETANDDWGSICQIGLVKYVDGVEESSESWLCTPPESLNFFNEINIGIHGITPEMVADQPRFADLVPKMVEFVGDLPLVAHNAQFDFTALSRACAASGIDVPEMIYGCSLTLARNEKLQVENHKLPTVASHLGFELKNHHDAAEDARACAAITIALAKRHSFEGSFVDFVHSRGFTMGTVDNARVYPVLKDRSGANVALQRRNFGLDAGKTEVPVQPAVDPAWETPKAEPKKQSGRRAPWDKVATPEVIPDPNPDADPSSILYGQNVTLTGDFEPYEKGALWQRIADQGALIGKNVTKKTTILVAGPWATITSKQKRAEELKEKGQDIQIWDEKQLFTALGLDEQPPF

SEQ ID NO: 23 - DNA, 496 bp, Corynebacterium glutamicum
  CDS (101)..(466): RXA01280
actttttcaaatccttcgccatcgacaagctcagccttcgtgttcgtcccccgggcgtcacgtcagcagttaaagaacaactccgaaataaggatggttcatgccaactattcagcagctggtccgtaaggcccgccacgataagtccgacaaggtggctaccgcggcactgaagggttcccctcagcgtcgtggcgtatgcacccgtgtgtacaccaccacccctaagaagcctaactctgctcttcgtaaggtcgctcgtgtgcgccttacctccggcatcgaggtttccgcttacatccctggtgagggccacaacctgcaggagcactccatggtgctcgttcgcggtggtcgtgttaaggacctcccaggtgtccgttacaagatcgtccgtggcgcactggatacccagggtgttaaggaccgcaagcaggctcgttcccgctacggcgcgaagaggggataattaaaaatgcgtaaatcagcagctcct

SEQ ID NO: 24 - protein, 122 aa, Corynebacterium glutamicum
MPTIQQLVRKARHDKSDKVATAALKGSPQRRGVCTRVYTTTPKKPNSALRKVARVRLTSGIEVSAYIPGEGHNLQEHSMVLVRGGRVKDLPGVRYKIVRGALDTQGVKDRKQARSRYGAKRG

SEQ ID NO: 25 - DNA, 1996 bp, Corynebacterium glutamicum
  CDS (101)..(1966): RXA01305
ttctcaaggctccctctcctttaagttcgtggccccagcgccagcttttttcataaaaactcaacaggcactgtgggaccccttcactttgaaagacatcatgcgcccctcttcccggccacttggcctcgtcctatgcaccgcactggcatcaacgatcatcaccgttcccgcagcgtccgcccaggagccagcgcttctcgatgcctccgccatcgccccacataccgccagctacggctactacgttgatgcatgggacaccaacgtttccactgatctgaatccatcaagtaatgcagctgttggcgtactggaggaaatgcttgagctgtggaccccaggcgaagaatggaacaccggcgtcaaggttgaccccaccgtgctggattccaacatcgcacagtctgtggcaatctcccagcaggcgaccgatgctcagcaagaacgtgcttgggttattgatcgccgcaaccagaactacaccgcaaccgacggtcttggcgcatacgcagatagttaccgcgagaccgcacaggtgggcaccaccatccctgacgttgttccagctgatgccaccaccgtgaagtacaacgatggcggcaatgtgaatggcaattgggcagagaccggtggagaactcggatccactgttgatctaattgaagctatccgtcagcatgccgcaaccagcaacaatgccaaggcgtactaccaatacccacgcccctaccgctggactgaatccatcgaaccagaagcctggggcgagggcgttgacatgccagagtatgcaaacccactgcgcaaggatgaatccgaagctgccagcgatggcggtttcccttccggacacacctccgcaggcggcatggcaaccaacggcctggcttacgctttcccacagcaatacgataaactgctcatgactgcagcggaaatcggcgaaagccgcatccagctgggcatgcactctccgcttgatgttattggcggccgtgttctatccaccgcgattactgcaggtgcacttaatgatccgaatctcgactcggtgaaggctgaagccttcgatgatgctcaggcatggatcagtaaccagagcgacatcaccaccaacactcgcgattttgatgagcaactcgccgagtacaccaacttcctcaccttcggcttcgagcagtccggcgacaccacccaagacatgcgcgtgccaaagggagctgaggctctgctggaaacccgccttccgtaccttgatgacgaacagcgccgttgggttctacattccactggcctcgagtccggtttcccagtacttgatgatgccgaaggttggggccgtctcaacctctacgctgcccaggctggctacagtgcattcgataccaacgttgacgtcaccatgaatgccatcgacggtggctacaacgccaaagacaactggcaaaacgacatcgagggcgcaggatccctgaccaagaacggttccggtgaactcaccctgtcaggtgacaactcctacaccggtggaaccaccatcaccgcgggcaccttggttgctgcaactgagtcagctctgggagcaggcgatctcaccatcaacgatggtgcaaccttgaagatcacccagcctgtcaccgtggatggaaccgcaaacctgggaggaactctgcacgttgcccttcctgttggcaccaaccacgtcaccgtgatcgatgctgcatcaatttccggtgaatttgatgaggttattgttgatggcgcagttgacgctcaggtgagctacgacaacggctctgtcgtgattactacaggcgcaccttctgatgacgtaaaggaaactggctcttctgctggcggaattcttgccatcgtggcagccctgggtggcattgcagcactgatcttcggtgcattcacccagtttggtttcccaccagcaatcaaggaaatgttcgacctttaagccttcgccaaccccacggcgtgcttt

SEQ ID NO: 26 - protein, 622 aa, Corynebacterium glutamicum
MRPSSRPLGLVLCTALASTIITVPAASAQEPALLDASAIAPHTASYGYYVDAWDTNVSTDLNPSSNAAVGVLEEMLELWTPGEEWNTGVKVDPTVLDSNIAQSVAISQQATDAQQERAWVIDRRNQNYTATDGLGAYADSYRETAQVGTTIPDVVPADATTVKYNDGGNVNGNWAETGGELGSTVDLIEAIRQHAATSNNAKAYYQYPRPYRWTESIEPEAWGEGVDMPEYANPLRKDESEAASDGGFPSGHTSAGGMATNGLAYAFPQQYDKLLMTAAEIGESRIQLGMHSPLDVIGGRVLSTAITAGALNDPNLDSVKAEAFDDAQAWISNQSDITTNTRDFDEQLAEYTNFLTFGFEQSGDTTQDMRVPKGAEALLETRLPYLDDEQRRWVLHSTGLESGFPVLDDAEGWGRLNLYAAQAGYSAFDTNVDVTMNAIDGGYNAKDNWQNDIEGAGSLTKNGSGELTLSGDNSYTGGTTITAGTLVAATESALGAGDLTINDGATLKITQPVTVDGTANLGGTLHVALPVGTNHVTVIDAASISGEFDEVIVDGAVDAQVSYDNGSVVITTGAPSDDVKETGSSAGGILAIVAALGGIAALIFGAFTQFGFPPAIKEMFDL

SEQ ID NO: 27 - DNA, 838 bp, Corynebacterium glutamicum
  CDS (101)..(808): RXA01343
ttcaaaatgaatggccaccaaccaattttcaccaaagttttatgtggcagggccagctccggcccgttaaaccacagaattccatgaaagggaatttctaatgagcaagaactctaaggcgtaccgcgaggccgctgagaagatcgacgctggtcgcatctactccccactcgaggctgcaaacctggtcaaggagacctcctccaagaactacgacgcttccatcgacgtagctatccgcctgggcgttgacccacgtaaggctgatcagcttgttcgtggcaccgtctccctgcctaacggcaccggtaagaccgttcgcgttgctgtgttcgcacagggcgagaaggctactgaggctgaggctgctggcgctgacttcgttggcaccgacgagctcgttgagaagatccagggtggctggaccgacttcgacgttgctattgcaacccctgatcagatggctaagatcggccgtatcgctcgtgtcttgggcccacgtggtctgatgcctaaccctaagaccggcaccgtcaccaacgatgtcgctaaggctatcgaagaggtcaagggcggcaagatttccttccgcgttgacaaggcttccaacctgcacgctgcaattggtaaggcttccttcgatgcgaagaagctggctgagaactacggcgctctcctcgacgagatcatccgtatcaagccttcttccgctaagggcatctacgtcaagcgcgtgaccctgtcttccaccaccggtcctggtgttgaggttgacactcacgtcaccaagaactacgcagaagaggcataagccttcccacgcgtaactctttaggcc

SEQ ID NO: 28 - protein, 236 aa, Corynebacterium glutamicum
MSKNSKAYREAAEKIDAGRIYSPLEAANLVKETSSKNYDASIDVAIRLGVDPRKADQLVRGTVSLPNGTGKTVRVAVFAQGEKATEAEAAGADFVGTDELVEKIQGGWTDFDVAIATPDQMAKIGRIARVLGPRGLMPNPKTGTVTNDVAKAIEEVKGGKISFRVDKASNLHAAIGKASFDAKKLAENYGALLDEIIRIKPSSAKGIYVKRVTLSSTTGPGVEVDTHVTKNYAEEA

SEQ ID NO: 29 - DNA, 2074 bp, Corynebacterium glutamicum
  CDS (101)..(2044): RXA01480
ggctggtggcttcacctgaagtggacagatcaattccaaaccatgcagcagcgaggacaacgatgactccgagcactccgccgagggtcttcttgctgttttgcatacaaccaatataggcacactaaagggacgggctaaagtgatggtcatggcaaagggacgtattccggaaagtgacattcaggcaatccgcgagcgcaccccgatcgaggagatcgtgggtgattatgtgcagctgaaatcggcaggtgctgattcgctcaaggggctttctccctttaaagatgaaaaaacaccatcgttccatgtgcgccccaaccgtggttactaccactgtttctccaccggcaaaggtggagatgtgttctccttcctcatggagatggaacacatctctttccctgaggctgtggaagtgtgtgcggagaaaattggttatcagatcaattaccaaggtggtggcccggggcgccgtgaggaacctggaactcgccagcgccttattttggctaataaggctgcgcaccagttttatcgcgagcaattagaaacccccgaagcacaacctggcagggagtttttgctgcagcgtggattcggacagcagcacatttatcatttcgaatgtggctatgcgcctgccggctgggataccttgaccaagcatttgctgaagaagggctttgagttcaaggaattagaagctgccggtctaagcaagatgggtaagcgcggtccgattgatcagttccagcgcaggttgctgtggccgatcaagaacctgtctggtgatgtcattggttttggcgcccgcaagcttttcgatgacgacaaaatgggcaagtacatgaatacgcctgagacgttgttgtacaaaaagtccaaggtgctctttggtctagattctgcaaagaaggccattgcagctggccaccaagcagtagtggtggaaggctacaccgatgtgatggccatgcatgccgcgggcattgatacagccgtggcatcgtgtggcactgcgtttggtgaagaacacttgcagatgcttcgtcgactcatgctggatgataactacttccgcggtgaactgatttacaccttcgatggtgatgaggccggccagaaggccgccatgcgtgcctttgagggcgatcagaagttcacaggacaatcatttgtgtctgtggcacccaacggcatggatccgtgtgatctgcgccttgagcgtggcgatgcggcggtgcgtgatcttgtggcacgacgcatcccgatgtttgagttcgtcatccaatcgatcatcagcgaatacaccctcgacaccgtggaaggccgtctggctgcgcttcgtcgggcagtccccatcgtggcggatattcgcgataagacgctgcagtctgaatacgcccgcctgctgtctggttgggtcggctggtctgatccttcagaggtgctgcgtcaggttcacgaggaagcacgtcgccccaagcgcgataagaagcctgtgcgtgcaaagcgtttcgatcaaccgctcgaggatcaaagcctgcgacccaccatggcgctgcctaatccgcggaaccctgtgctgtggcaggaacgggaatcactcaagatcgccctgcaatatccggagctcgcgggatcgtactttgatggactgccaaccgatagcttcaccaaccctgcctaccgcatggtacgcgatgccatttcggctgctgggggatgtgaacgtgccctcgatggcactgattggttgcctgccgtatcggaaaatatgactgatattttgggcacgtcgttggtgtcagagctggcgatggaacccatcgaggtggaagcgcaagacctggaatcatataccgatggtgtgttgtccaggctgcaggaaacacgagtgggcaaccagatcgccatcttgaaaggacagctgcaaagaatgcgtccgtctgaagatgagcaagcctacaactcgctgttttccgatctggttgccctggaacaggcgcgccgggagctgttggcccgggcgtttagagggtaatttagtcctggtcttgctcgaggactt

SEQ ID NO: 30 - protein, 648 aa, Corynebacterium glutamicum
LHTTNIGTLKGRAKVMVMAKGRIPESDIQAIRERTPIEEIVGDYVQLKSAGADSLKGLSPFKDEKTPSFHVRPNRGYYHCFSTGKGGDVFSFLMEMEHISFPEAVEVCAEKIGYQINYQGGGPGRREEPGTRQRLILANKAAHQFYREQLETPEAQPGREFLLQRGFGQQHIYHFECGYAPAGWDTLTKHLLKKGFEFKELEAAGLSKMGKRGPIDQFQRRLLWPIKNLSGDVIGFGARKLFDDDKMGKYMNTPETLLYKKSKVLFGLDSAKKAIAAGHQAVVVEGYTDVMAMHAAGIDTAVASCGTAFGEEHLQMLRRLMLDDNYFRGELIYTFDGDEAGQKAAMRAFEGDQKFTGQSFVSVAPNGMDPCDLRLERGDAAVRDLVARRIPMFEFVIQSIISEYTLDTVEGRLAALRRAVPIVADIRDKTLQSEYARLLSGWVGWSDPSEVLRQVHEEARRPKRDKKPVRAKRFDQPLEDQSLRPTMALPNPRNPVLWQERESLKIALQYPELAGSYFDGLPTDSFTNPAYRMVRDAISAAGGCERALDGTDWLPAVSENMTDILGTSLVSELAMEPIEVEAQDLESYTDGVLSRLQETRVGNQIAILKGQLQRMRPSEDEQAYNSLFSDLVALEQARRELLARAFRG

SEQ ID NO: 31 - DNA, 1393 bp, Corynebacterium glutamicum
  CDS (101)..(1363): RXA01563
ccgccaagtgcctaccaagtggaaatgcgtgcgtcctggaccgcgactggcaccgacctcaccgcgcatgttgaagcgttcgcagcagtgcttgcctctgttgctggacttcccccagagggcgtcaccgaactacgaaggtagattggacaccatggtttccgatctccttcaaccccgcgacggcattccgcctttgctatctacccctggtgagttcactgctgcggcagatctcttggctagcggaactgggcccttcgccattgatacggaacgcgcgtccggttttagatacgatgaccgcgcatttttgattcagatccggcgccgtggcagcggaactctcctattcgacccggagcagttccgtcctgaattaactcaggcgttaaagccggtgctcaatggtcaagagtggatcattcacgcagcaagcaccgatttgccgagccttgcgtggcttgatcttcaccccggattactctttgatacagaacttgctggccgcttagccggatttgatcacgttaatctcgctgccatggtggaacagatttttgatctccacttgctcaaaggccacggttcggaagattggtccaagcgtcctctgccggaatcttggctcaactacgcagcactcgatgtggagatgctgctggagcttgccgatgtcatggctgaaatcctggatcagcagggaaaactcccctgggctgaacaggaatttgtccatattgtggatcaattcgccacgatgaccgaaccttccgaaacgtcctggcaggaccttaaagggctgtccactctcaaacgaccagaccaattagttgtggcccgtgaaatgtggttggaacgcgactctttcgcagcctcccgcgacctggcgcccggtaaagtgctgtccaacaaagtcatcgtggaagtcgcccgtgttctcccccgcaccccggcagaattagcgcaggtcaagggattccccggtcgatcccagggtgccaccaaacgctggttccgcatcatcacccgggcgctcaaatcccctcgcaggaactggccaaagcctcagcagcgcaaggacggcatccccgatcgtcgcgcgtgggcgtcctactacccagaagagcacgaagtgctccaagagattagagcgcttatcgacgacctcgccgccgatatcaacgttcccggcgagaatatccttcagccttcaactctgcgagtagctgtgtggatggctaaacacaccggcgagatccataatgctgaaacactcaacgctgtacttcgcgattatggtgcccgccagtggcaaattgaccagacttttccgattctgtccgccaacttgctgaagctctaaacctaaagcccgcggctaaggctgcgg

SEQ ID NO: 32 - protein, 421 aa, Corynebacterium glutamicum
LLDFPQRASPNYEGRLDTMVSDLLQPRDGIPPLLSTPGEFTAAADLLASGTGPFAIDTERASGFRYDDRAFLIQIRRRGSGTLLFDPEQFRPELTQALKPVLNGQEWIIHAASTDLPSLAWLDLHPGLLFDTELAGRLAGFDHVNLAAMVEQIFDLHLLKGHGSEDWSKRPLPESWLNYAALDVEMLLELADVMAEILDQQGKLPWAEQEFVHIVDQFATMTEPSETSWQDLKGLSTLKRPDQLVVAREMWLERDSFAASRDLAPGKVLSNKVIVEVARVLPRTPAELAQVKGFPGRSQGATKRWFRIITRALKSPRRNWPKPQQRKDGIPDRRAWASYYPEEHEVLQEIRALIDDLAADINVPGENILQPSTLRVAVWMAKHTGEIHNAETLNAVLRDYGARQWQIDQTFPILSANLLKL

SEQ ID NO: 33 - DNA, 976 bp, Corynebacterium glutamicum
  CDS (101)..(946): RXA01581
tggtgttttcgaggtgcagatcttccgcaccgcgatgggcaacaatgtgcatattcttatacatccttttctgtgggctttttaaggatagggagcaaagttgaccgcacggttaactgttagtgttatgagcatggcattggactttaatgaggcgtttaccgaacgcaccccgcgcatcgtcaacgcagctaaactgcatcgcgccgcgcagcgcaaaaaagataagcgttttctagttgaaggcgaaaattccgttgaagcagctgtcgctaccggcgcagcaactgacctctttgtcactgaatccgctgcggagcgcttcgaggaaatcgtccgcaccgccggttacatgaatgtctacacccacgcgatcacggacaaggccgcgaagcatcttagcgacaccgtcaccaccacgggcatttttgcgctttgcgacgacgtcctgtggtcagtcggcaaggcgatcaccggccagccacgtctagtgagcgtgccggttgagacccgcgagcccggtaatgccggaaccttgattcgcgtatccgacgcggtcggcgccgacgccgtcgtcttcgctggtgaatcagtagatccacttggcgcaaaagctgtgcgctcctcagcgggatcgctgtttcacattccagtggcacgcaacaacaacatcgcagatgtcttggggcagcttcgttccaagggtctgcagatccttgcgacctcagccgatggggaagtagacctcgatgacgccgatgagctgctagccaagccaaccgcatggctttttggtaatgaagctcacggacttgatgagagcctgcttgctcaggctgatcaccgcgtgcgtattccgatccgcggccgcgcagaatcactcaatttggccacagcagcgtcaatttgtctgtacgaatcctccaaggcactattcgccggtgagtaaaccccaattcatgcccagcgggtatga

SEQ ID NO: 34 - protein, 282 aa, Corynebacterium glutamicum
LTARLTVSVMSMALDFNEAFTERTPRIVNAAKLHRAAQRKKDKRFLVEGENSVEAAVATGAATDLFVTESAAERFEEIVRTAGYMNVYTHAITDKAAKHLSDTVTTTGIFALCDDVLWSVGKAITGQPRLVSVPVETREPGNAGTLIRVSDAVGADAVVFAGESVDPLGAKAVRSSAGSLFHIPVARNNNIADVLGQLRSKGLQILATSADGEVDLDDADELLAKPTAWLFGNEAHGLDESLLAQADHRVRIPIRGRAESLNLATAASICLYESSKALFAGE

SEQ ID NO: 35 - DNA, 853 bp, Corynebacterium glutamicum
  CDS (101)..(823): RXA01661
accaccggaaattcccctctgacagctgttgccgcgttgcgtgaagctggcattgaggttgtgggcgttgccaccgtggtcgatcgcgcaaccggtgcagatgaggttatcgcagcggaaggccttccttaccgcagcttgctgggactttctgatcttggactcaactaacacccccggccccacggagtggggcgagtcccgcgtgggcaaaggtccatgggaagaggaaaaccccggcgtacctcggcctacaagcccgcttttcgacgtcaccctcctcaacgagggcgatcgccgcaacgttgttgacgcctatcgttattggacccgtgaggcgattgttgaagatatcgacacccgccgccacagcctccacgtagcgatcgaaaactttgaaaacgacgccaacatcggcaccgtcgtgcgcaccgccaacgcctttgccgtgaacacagtccacattgtgggcaggcgtcggtggaaccgcaggggagccatggtgactgaccgttaccagcacctcatgcaccacgaagacgttgattcgctgcttgcgtgggcaatcgcggagcggcttaccatcgtcgcgatcgataacaccccaggttccgtgcctttggaaaccgctgagttgccgaagaactgcctgttgctgtttggtcaggaaggcccaggtgtcaccgaagctgcgcgtgcaggtgcgttaatgacctgttcgattgcccaatttggttccactcgatccatcaacgcgggtgtagctgctggtattgcaatgcatgcatggattcgtcaacatgccgacttatcgcaagcctggtaattttataccctagatcgttagactttc

SEQ ID NO: 36 - protein, 241 aa, Corynebacterium glutamicum
MRLSQRKAFLTAACWDFLILDSTNTPGPTEWGESRVGKGPWEEENPGVPRPTSPLFDVTLLNEGDRRNVVDAYRYWTREAIVEDIDTRRHSLHVAIENFENDANIGTVVRTANAFAVNTVHIVGRRRWNRRGAMVTDRYQHLMHHEDVDSLLAWAIAERLTIVAIDNTPGSVPLETAELPKNCLLLFGQEGPGVTEAARAGALMTCSIAQFGSTRSINAGVAAGIAMHAWIRQHADLSQAW

SEQ ID NO: 37 - DNA, 2698 bp, Corynebacterium glutamicum
  CDS (101)..(2668): RXA01683
cccaaaatggtatcgctttgataccaattttggggcatgcaaggcgttaaaacggcctgtggactaaaatcggtagggttgacacgaagaaaggtgatcagtgagcgacgacaataccggacaatttgaccgcgttaatcccattgatatcaatgaggaaatgcagtcgagctacatcgactacgcgatgtcagtcatcgtcggacgtgccctcccagaggtgcgcgacggcctgaagccagtccaccgccgcgtcttgtacgcgatgttcgacaacggctaccgccccgaccgcagctacgtgaagtctgcaaaaccagtggcagacaccatgggtaacttccacccacacggcgacaccgcaatttatgacacgttggtgcgcatggctcagccatggtccatgcgatacccgctggtagacggccagggtaacttcggttcccgcggcaacgacggccctgcagcaatgcgttacaccgagtgccgcatgaccccactggccatggagatggtgcgcgacatccgcgaaaacaccgtcaacttctcaccaaactacgacggtaaaaccctcgaaccagacgttttgccatcgcgcgttccaaacttgttgatgaacggttcgggcggcattgcggtcggcatggccaccaacatcccaccgcacaacctcaacgagcttgccgacgccatcttctggctcctggaaaacccagacgccgaagaatccgaagctctcgaagcctgcatgaagtttgtgaagggcccagacttcccaaccgctggcctcatcatcggtgacaagggcatccacgatgcctacaccaccggccgcggctccatccgcatgcgcggtgtcacctccatcgaggaggaaggcaaccgcaccgtcatcgttatcaccgagctgccataccaggtcaacccggataacctgatctctaatatcgcggagcaggtgcgcgacggcaagctcgtgggcatctccaagattgaagatgaatcctccgaccgcgtcggcatgcgcattgtggtcaccctcaagcgcgacgcagttgcccgcgtggtgctgaacaacctgttcaagcactcccagctgcaagccaactttggtgcgaacatgctctccatcgtcgatggcgtgccacgcacccttcgcctggaccagatgctgcgctactacgtggcacaccagatcgaagtcatcgtgcgccgcacccaataccgcctcgacaaggctgaagagcgcgcccacctcctccgcggcctggtcaaggccctggacatgctggacgaggtcatcgcgctcatccgccgcagcccaaccccagatgaagcccgcaccggcctcatgtcgcttctcgacgtcgacgaggcgcaggctgacgcaattctggcaatgcagctgcgtcgcctggcggcactggaacgccaaaagatcatcgatgagctcgctgaaatcgagctggaaatcgctgacctgaaggccatcctggcaagcccagaacgtcagcgcaccatcgttcgcgatgagctgaccgaaatcgtggaaaagtacggcgacgagcgtcgttcccagatcatcgctgccaccggcgacgtgtctgaagaagacctcattgcgcgtgaaaacgttgtcatcaccattacctccaccggttacgcaaagcgcaccaaggtcgatgcctacaagtcgcaaaagcgtggcggcaagggtgttcgtggcgcagagctcaagcaagatgacattgttcgtcacttcttcgtcagctccacccacgactggattttgttcttcaccaactacggtcgcgtgtaccgcctcaaggcattcgaacttccagaggcatcccgcaccgcacgtggacagcacgtggccaaccttctggaattccaacctggtgagcaaatcgcccaggtcatccagttggaaagctacaacgacttcccatacctggtgctcgcaaccgcacacggtcgcgtgaagaagtcccgcctgctcgactacgaatcagcacgttccggtggcctcatcgccatcaacctgaacgaggacgatcgcctcatcggcgccgcactttgcggtgaagaagacgatctgctgctggtctctgaattcggacagtccatccgcttcaccgccgacgatgagcagctccgccccatgggccgcgccaccgccggtgtcaagggcatgcgcttccgcgacaacgaccaactgctgtccatgtccgtggtccgcgacggcgaattcctcctcgttgccacctccggcggctacggcaagcgcaccccacttgaggattactccacccagggccgtggtggcctcggcgtggtgaccttcaagtacaccccgaagcgcggtcgcctcgtcagcgccatcgcagttgaggaagatgacgagatcttcgccatcacctccgccggcggcgttgttcgcaccgaagtcaagcagatccgaccatcctcccgtgcaacaatgggtgttcgactggtcaacttggaagaaggtgtagaactgcttgccatcgacaagaacgtcgaagaccagggcgaagcatccgcagaagcagtagcaaagggtgcagtcgaaggaccagcatccaagactgctgccgaagaaaccgactccgttgacaacggatccgacgaaaacggcgaggaataatttatggcatcccgagaagtatccatc

SEQ ID NO: 38 - protein, 856 aa, Corynebacterium glutamicum
VSDDNTGQFDRVNPIDINEEMQSSYIDYAMSVIVGRALPEVRDGLKPVHRRVLYAMFDNGYRPDRSYVKSAKPVADTMGNFHPHGDTAIYDTLVRMAQPWSMRYPLVDGQGNFGSRGNDGPAAMRYTECRMTPLAMEMVRDIRENTVNFSPNYDGKTLEPDVLPSRVPNLLMNGSGGIAVGMATNIPPHNLNELADAIFWLLENPDAEESEALEACMKFVKGPDFPTAGLIIGDKGIHDAYTTGRGSIRMRGVTSIEEEGNRTVIVITELPYQVNPDNLISNIAEQVRDGKLVGISKIEDESSDRVGMRIVVTLKRDAVARVVLNNLFKHSQLQANFGANMLSIVDGVPRTLRLDQMLRYYVAHQIEVIVRRTQYRLDKAEERAHLLRGLVKALDMLDEVIALIRRSPTPDEARTGLMSLLDVDEAQADAILAMQLRRLAALERQKIIDELAEIELEIADLKAILASPERQRTIVRDELTEIVEKYGDERRSQIIAATGDVSEEDLIARENVVITITSTGYAKRTKVDAYKSQKRGGKGVRGAELKQDDIVRHFFVSSTHDWILFFTNYGRVYRLKAFELPEASRTARGQHVANLLEFQPGEQIAQVIQLESYNDFPYLVLATAHGRVKKSRLLDYESARSGGLIAINLNEDDRLIGAALCGEEDDLLLVSEFGQSIRFTADDEQLRPMGRATAGVKGMRFRDNDQLLSMSVVRDGEFLLVATSGGYGKRTPLEDYSTQGRGGLGVVTFKYTPKRGRLVSAIAVEEDDEIFAITSAGGVVRTEVKQIRPSSRATMGVRLVNLEEGVELLAIDKNVEDQGEASAEAVAKGAVEGPASKTAAEETDSVDNGSDENGEE

SEQ ID NO: 39 - DNA, 1483 bp, Corynebacterium glutamicum
  CDS (101)..(1453): RXA01718
gatctatctggcctgtccacactaatctatttgtgttgaggcaggtggaatcttgttaacagctgttttgtctttaattgctggtttggtggtcattggggtgatcatcgtcctcaacggatattttgtggctcaggaatttgcctacatgtccgttgatcgaaatgagctgcgagctctcgctgactctggagataagaaggctcgtcgcgctctcagcatcactaagcgcacatcctttatgctttctggtgcgcaattgggtatcaccgtcaccggacttttggtgggttttgtggccgaacctctggtgggtaacgcgttaggtgttctgctaggaggggtgggggttcccgctgcggtgtcaatctctgtgggcactgtgttggcgctagcgatctccacggttgtccaaatgatttttggtgaactcttccctaagaactacacccttgccacgccgttgaagtctgcgctggcgcttgcgccttcgaccacgtggtatttgaaactcgctggttggttgatcacattctttgattttgcatccaacgcattgcttcgactctttcgaatagagccggtggaagatgttgattcgtctgccactgcacaagaccttccgcatattgtggcgtcatctagggatagtggcgttttaaataattcgatgtctttgtcgcttgatcgattgttggatttcccgtcgcatgatgtgggtcatgcaatgattccgcgttcgcgtgtgggtgtggttgatccggagacaaccatcgctgaggttaaggccctcatgaggaaagcgcatacgcgttaccccatcatcgatgacaaccatgtgcccattggggtgatcaatctgattgatattcttggaaccgatattcacggcgccgaaatttcagattccgcgaaagtcactgagttcatgcatcagcctgtgatcgttccagagtttatgtctttgcctgacgtggtgaccgaactgcacaatcgtgaagacaggcttgcttgcgtgattgatgaatacggtggattcattggcattgtgacattagaagatttagctgaggaagtcctcggcgatatcaacgatgagcacgatgttttcagctctgaagatattacggaaacgagccctgacaaatggctaattgatggcgatacccctcttgacgaggttgagcgcgccatcgggtacgagctacctgaaggcgattacgagacgatttctggactgctctttgaccatgcgaatgcccttctaaagactggggatgtcatagaaatacctctggattttgagccagaggattacctgaacaacacctcccctacgcagcgtattttgcgcatcactgttttagaggtagagcgaaacgtgcctgtaaaactggcgctcgctctgctcgaagaccacccagacaatcaccccgctccgaaggagaatcgctaagccatgactgaatggtatgtcgtttta

SEQ ID NO: 40 - protein, 451 aa, Corynebacterium glutamicum
VIIVLNGYFVAQEFAYMSVDRNELRALADSGDKKARRALSITKRTSFMLSGAQLGITVTGLLVGFVAEPLVGNALGVLLGGVGVPAAVSISVGTVLALAISTVVQMIFGELFPKNYTLATPLKSALALAPSTTWYLKLAGWLITFFDFASNALLRLFRIEPVEDVDSSATAQDLPHIVASSRDSGVLNNSMSLSLDRLLDFPSHDVGHAMIPRSRVGVVDPETTIAEVKALMRKAHTRYPIIDDNHVPIGVINLIDILGTDIHGAEISDSAKVTEFMHQPVIVPEFMSLPDVVTELHNREDRLACVIDEYGGFIGIVTLEDLAEEVLGDINDEHDVFSSEDITETSPDKWLIDGDTPLDEVERAIGYELPEGDYETISGLLFDHANALLKTGDVIEIPLDFEPEDYLNNTSPTQRILRITVLEVERNVPVKLALALLEDHPDNHPAPKENR

SEQ ID NO: 41 - DNA, 3340 bp, Corynebacterium glutamicum
  CDS (101)..(3310): RXA01736
cacctccgcggccccaatctgctcgcccgagtaaatcccacatgctcgacgtgtcccgttcgaagcctgtgcccagttcaacccgaaggacgtgtcatccatgcgtaggatttctcctcgactgctctcccaatatttgggacaagagcatgcgccaactgatcagcaatctgcgatcattggatccgaacccggcccactgttggtagtggctggtgccggcgcaggaaaaacggagacgatggctgcacgagtggtgtggttggtagcgaacggattcgtcgccccagatcaagtgctgggtctgacatttaccaggaaggcggcgcaacagctgtcgcagcgcatccgaaagcgtttggagactcttgctggtgtgcctcgcctgaaagacattgatcccaccggccagttggagaaaaaccttcaggcgatcaccccaacggtatccacctatgactcctatgcgggcacgttgattagagaatacggattgctgcttccagtagaaccttccgcaaggttgatcacacaaacggagctttatcacatcgctcgcaacgtggtgaacaactacgacggtgagctcaccgccacccaaacgccggccactgtcacggaatacctcctcaagctggtatccgaaatggacaaccacatggttaccgcagaggatatccgtgaggagtccgatccgttcattaagcttttcgacgaactccccaagggcaagggtcagcgcgacaacctcaacgccgaaatgacgaagtggcgggatacacaggtcgctcgcctccagtacttgcccctcgtgaaggctttgaaagaggaactgcacaatcaggctgtggtgacgtttggtgagcagatgtctaaggcagctcatctcgcatcgacgcatcctcaggtgggctattcgcagaggcgacggttccgcgttgtcatgcttgatgagtatcaggacaccagccactcgcagcgtgtgttgttgagcagtcttttcggtggcaccgatcctggtctcactgttaatgctgtgggcgatccaatgcaggcgatttatggttggcgaggtgcgacagcggcgaacttggagaatttcgttgacgatttccccgtcatccatctcgatggaaaaacgagagcaccgaaaaacgagttgaccacaagttggcgaaacccaccagaagtcctcacccttgccaacgcagtttcgcgggaggtgcttgggtcgcccgatgcgccgactcggacggtgcagccgctgcagcctcgggaaggcgcaccgaccggtgaagtgtcgctcggatggtttggtacggcggcgcaggaacgtgagtttgtggctgatgagatggtgaagcattggaatgcgcgggaggagaagggcacatttactgctgcggtgttggtgcgtaagaagcgtcattcggcaccgatggcggaggagctgaccaagcgtggcatccccgtggagatcgtcggactgtctggtttgttggatatccctgagattgccgatctaatttctctagcaactatgctcgtgcgtcctcacgataatcgggctgcgttgcgtattttggcgggcccgcatgtgggtttgggtgtggcggatttgcagcggttgcagggtcgtgcgcgcaatattgcgggtcgtgtgtctcgtgagcgtcgagagaagaacccagatccattagcggagcttgatgcgattattgaggaagcgactgcgattgaaccggaagctgtggttggtctagctgatgcggttgccgatttgggtgagggcgatcgtttcagcgaggaggggttgagtcgtttgaagcgactggccactcagttgcgatatttgcgtaagtacagcttgggtcgttcggtggcggacatttttgctgatattgaaactgtgttcaatattcgcacggaggtgttgtcgaggcaggatcctcacgccgatggtgctgctggaacggtgcatttggataagttcgcagaagaggtcgcaagtcacggtggcattgggctgcctgagctgttggactattttgagctcgcgaaggatcaggaagagggccttgagccgggtgaggtgacggttcgcagcgatcgtgtgcagatccttactgtccacaaggctaagggtttggagtgggatatcgtttcggtgttgcatgccgatgcgtcgacctatgatgcgaaggcttcgacgtggttgaaaaatgtcacgatgatcccgtcgtcgcttcgtggcgatgccgggaccggcgccccagagatggatacctctgaggcggacgatcgcaaagctctggaagattccggcaaggagtacaccagtgaagtgcgtgaggggttacgggaggaaaattcgcgactgttttatgtcggtatcacgcgcagcgaacgggtgttgctcgtgacgggttcggcgcttgatgaaagtggcacaaaggcgaaagttccctacggccacttggagatccttcgggataaagcgccggagtgcgtggtgtcgtggtgggaaggggaagagggggacgtcgaaaagcaaaaacctgcggaaggcgtcttcccgcaactgctcgccgctgactcctccggcgcggatttggtgcgcggcccgcgcgccgagccaaacaacgagggcgggctggaaagcttgtgggaaaaagaggtaagcgcgcttatcgacgaacaccgccgcctttccaaccccatcgtcgaagtcgaaacgccccgcgaactcacggccaccgacctcgtctctatgaaaaacaatcccgaacagttcgcccgacgaatgcgtcgccctgtcccgttcaaaccaaacacctacgcaaaacgcggcacactgttccaccaatggctcgaagatcggtttggcagcaccgcgcttctcgacgaaaccgagctccccggcatcgacgaggactactcggatgacgcattcatcgaactccgcgacgcgttcctaggatctacttgggaaaaccgcacaccggaattcgtcgaacatcccttcgaagtaacgatcggcgaacacgtcatccgcggccgcatggacgccgtcttccacaccgatggcacctggatggtggtcgactggaaaaccggacgcaccccaaccggccccgaaatggacgcagcgatcatccagctcgctgtctatagactcgcctgggcacgactcaaaggcctcgaacctgaagaagtccgcgcagcattccattacgtcgcccacgatcacacctttgagccgaacgatctgccgactcaagaagaactagcccggctgctcagtcaggaatgatgcgcctaagatcaaacaagaatgaaa

SEQ ID NO: 42 - protein, 1070 aa, Corynebacterium glutamicum
MRRISPRLLSQYLGQEHAPTDQQSAIIGSEPGPLLVVAGAGAGKTETMAARVVWLVANGFVAPDQVLGLTFTRKAAQQLSQRIRKRLETLAGVPRLKDIDPTGQLEKNLQAITPTVSTYDSYAGTLIREYGLLLPVEPSARLITQTELYHIARNVVNNYDGELTATQTPATVTEYLLKLVSEMDNHMVTAEDIREESDPFIKLFDELPKGKGQRDNLNAEMTKWRDTQVARLQYLPLVKALKEELHNQAVVTFGEQMSKAAHLASTHPQVGYSQRRRFRVVMLDEYQDTSHSQRVLLSSLFGGTDPGLTVNAVGDPMQAIYGWRGATAANLENFVDDFPVIHLDGKTRAPKNELTTSWRNPPEVLTLANAVSREVLGSPDAPTRTVQPLQPREGAPTGEVSLGWFGTAAQEREFVADEMVKHWNAREEKGTFTAAVLVRKKRHSAPMAEELTKRGIPVEIVGLSGLLDIPEIADLISLATMLVRPHDNRAALRILAGPHVGLGVADLQRLQGRARNIAGRVSRERREKNPDPLAELDAIIEEATAIEPEAVVGLADAVADLGEGDRFSEEGLSRLKRLATQLRYLRKYSLGRSVADIFADIETVFNIRTEVLSRQDPHADGAAGTVHLDKFAEEVASHGGIGLPELLDYFELAKDQEEGLEPGEVTVRSDRVQILTVHKAKGLEWDIVSVLHADASTYDAKASTWLKNVTMIPSSLRGDAGTGAPEMDTSEADDRKALEDSGKEYTSEVREGLREENSRLFYVGITRSERVLLVTGSALDESGTKAKVPYGHLEILRDKAPECVVSWWEGEEGDVEKQKPAEGVFPQLLAADSSGADLVRGPRAEPNNEGGLESLWEKEVSALIDEHRRLSNPIVEVETPRELTATDLVSMKNNPEQFARRMRRPVPFKPNTYAKRGTLFHQWLEDRFGSTALLDETELPGIDEDYSDDAFIELRDAFLGSTWENRTPEFVEHPFEVTIGEHVIRGRMDAVFHTDGTWMVVDWKTGRTPTGPEMDAAIIQLAVYRLAWARLKGLEPEEVRAAFHYVAHDHTFEPNDLPTQEELARLLSQE

SEQ ID NO: 43 - DNA, 3895 bp, Corynebacterium glutamicum
  CDS (101)..(3865): RXA01770
tgctcatgacaggtaattcaacgcgttaccctgctgcagcataaaagaacctgcctcaacacacctccactttttctacttttaagaaagccacattctcatgccaattatcattgataacctcaattctgacgacgactccaccatcggcactgccaccgaatacaaccctgacactgacgccgatttacttgatgctattaacgctgatgctgaccttgatggcgacgccaccatcagcactaacgcgacagaagaaggtgtagacgcagcagctgaaaaacctaagaaaaagcgtaaagcccctgctctgaagcctaaaggactcacggcaaagttcttccaccgtgatcttactggcgtaggtggtaggaccggtcgcctcaacaagaacgtacacccgaccaacccagatctgtcctaccagccagtctctgatgtctacaccccacaatcagcagatcacaagggtattaagacccgctacatccttacccatccaacccccgctgttgttctcagtgagtccatcagcaacgcgtttcatgtctctaccctgcgtcgcaacaataatgtcaacaactctgattcggaattggctgcctggccgtacctctaccaactcgatattccgcagctggaccagatgattaatgtcgctgacatctgtgattaccatttccacggatataacctgtgggtggattttaccccgcagactatcgctctacgatccggtaagacggtactcgatgacggtaccaccgcctctgataacaccactcatgtctattaccgcgtcaccgttcacgttattgccggtcaagatcatggatctactctgcttgatgaccagggcaaccaggtgcttgatagggatgataatcctatttctaccccaagtatcaagcgtattggcgctgtcactgatcttttcgatcacaatccttttggcttcgctagtgtaaactctttcgcatttgtcgatttctcatgggacccagccaccaccttggtcgatatgctcaacaaccttgattcatatctctctaatcacatcaatattgccagctccccaacccccattgccctcgatatggttgtgctcaatgaatggtctgaaaagtcctatcagctgtgcgaacgcgttgttgcacaggcaaagctcatcaacagcaacaagatcaccgcacatgtgagtgatgtcatcaagcaaaatgcccacaatatcttgtggtttaccgaacagatgaaccctggcaccaccaacctcagcgaggtacctatctccaagaagtctatgctgccgatgtctcgccagctacgtattttggagcactacgatgtaccactgaccgcgtactctgctcttttctggactgtcagcgccattaagaatgaatctatggtgcagtaccttgtgcgacagaatatgcagctcaccttgagctcaaatctggatgcactcaactccattgtctcccagctccctgtaccagataaggacgttgtggctgcttctggctaccagattcagccacacttctccacgcagcagcgtgaagcaatcaccactgataatcctctcgcgattattcaggccggtgctggtaccggtaaatccaccgtgattctggaacgcattgagtacttgtgcgctgcaggcaccaaccctgaagagattgctgtgctgtcttttactaatgctgccgccgataacatcacagcaaaaaatgacaaggtgacctctatgaccatctccaagatggttcatgagatttacgcacacaatttccctgatcatgagatctccaccatcgacaccattatcaatacgcttgatattgaatacggcgatcaaatggtgacctccgattacatgattcagctccgtgacctgctctataaggtcatgacgcagggtggcaacgccaacctgacagcgttgagcatcttcatggaatcccatatcgaggcgttcatctcggtgttggatcagatcaagcagacttctcttgagctggaaatcatcatctgctacctgctcttggataagctgatcgagcctcatgcatcgccgaagtacctcattattgatgaggtgcaggacaactcggtcttcgagttcgtctttgcacttcgttttgcggcaaagcacaatacgagtctgtacttggtgggtgactcgtcacagaccttgtatgagttccgttctgctaaccctaaggctctgaactccctggaagcatctggtgttttcggtacctaccgtttgaccaccaattaccgttccaaccaggaaattcttgacttcgctaatatccacctctcggatattgaagctaaccagttcgcaggtattcagctctacgccaactcttttgatgcacctactgcggacagcttcaaagaaaaggttgaactggacatgcaccatgtgtctaagcagtctgagtttaccgacagcattccttatttcatggagtccaataaagctcgctttgatgctgcgatcttgaacaatgagcaaaccattgtgcttgctcattctggtcgtgaaattcgtgcagcgcagcaagcgctagccgagatgtaccccagcatcacggtgcgtaacttgcagtccgataagggtttcaacaacacggtattttcgacctttattaaggatttctggtttgaggtcaccgctgtagacccagctcatgccgcatttacctttaccagccaagtcaccgctcatctagataagttggtacgcggaaagcgtgagcagatggaggatcgcgttatccggtctatggctgcatggtggcgtgaaaatgagcgtgacatccagggttgggtgcagcaaactcagtccggtgcgatcaccaacgaagagttcttctaccgtcttcgtcagtgcattcttgactatgaaatcaggaataaccgagcacgtcagtccatgctcaatgcgcgcaacaacgctaacaaggaggctgtcgcacaggagaaaccactgctcatggtctccaccattcacagtgcaaagggtctggaattcgataatgtcatcgtgcttcaaaaaccaagctccgatgcagagatgaccgaagaaggtaagcgcgcaacctatgtggcgctgacccgtgcaaaaaagcgtgaactcattattgctggttctactcgcgcatacccacgcatcgtcaccgattatgagcaaatcgttgatcttcttgaaaagcgcgatgaggagcgcaaaattaaggaggaagaggctgcagcactcgccacccttgaagctgaacaggagacgcgcgcccttgctgctgctgaggcgcaggctcaggcgttgttgcttgagcacaacccgtggttgcgtgatctcagcgatgaagaagtcactgctctaactgagcaagagatcatcaacaatgttgaggcagccctacagattgaagaagaggaggaagaggctcgtgcactcgctgcagcagagccagcaattcagcagtacttgtctcagtttgctttcgatgagttcccggacgacgacaatgtagccaacactgtcgtacatgtagcaccacagcctattctccaccaggcagtgcctgcagatgtgactgtacaatcaagcaccgcccccgtaacacctgttgttgcggatcttgaggtaaccactgttgcagctgatccagtcgaaccgactatcgttgctgcacagcctgaggtggacgacaaccttgtctacagcacgtccacccctaatagtcacagtgacgttattgcagtgaactctgatacctcagaaaacgctgctgttaatccagttctgtccgatattgaggcactccgagcaattttcaacaaccaggactaaaacacctgctgctgttgagcgcttctc

SEQ ID NO: 44 - protein, 1255 aa, Corynebacterium glutamicum
MPIIIDNLNSDDDSTIGTATEYNPDTDADLLDAINADADLDGDATISTNATEEGVDAAAEKPKKKRKAPALKPKGLTAKFFHRDLTGVGGRTGRLNKNVHPTNPDLSYQPVSDVYTPQSADHKGIKTRYILTHPTPAVVLSESISNAFHVSTLRRNNNVNNSDSELAAWPYLYQLDIPQLDQMINVADICDYHFHGYNLWVDFTPQTIALRSGKTVLDDGTTASDNTTHVYYRVTVHVIAGQDHGSTLLDDQGNQVLDRDDNPISTPSIKRIGAVTDLFDHNPFGFASVNSFAFVDFSWDPATTLVDMLNNLDSYLSNHINIASSPTPIALDMVVLNEWSEKSYQLCERVVAQAKLINSNKITAHVSDVIKQNAHNILWFTEQMNPGTTNLSEVPISKKSMLPMSRQLRILEHYDVPLTAYSALFWTVSAIKNESMVQYLVRQNMQLTLSSNLDALNSIVSQLPVPDKDVVAASGYQIQPHFSTQQREAITTDNPLAIIQAGAGTGKSTVILERIEYLCAAGTNPEEIAVLSFTNAAADNITAKNDKVTSMTISKMVHEIYAHNFPDHEISTIDTIINTLDIEYGDQMVTSDYMIQLRDLLYKVMTQGGNANLTALSIFMESHIEAFISVLDQIKQTSLELEIIICYLLLDKLIEPHASPKYLIIDEVQDNSVFEFVFALRFAAKHNTSLYLVGDSSQTLYEFRSANPKALNSLEASGVFGTYRLTTNYRSNQEILDFANIHLSDIEANQFAGIQLYANSFDAPTADSFKEKVELDMHHVSKQSEFTDSIPYFMESNKARFDAAILNNEQTIVLAHSGREIRAAQQALAEMYPSITVRNLQSDKGFNNTVFSTFIKDFWFEVTAVDPAHAAFTFTSQVTAHLDKLVRGKREQMEDRVIRSMAAWWRENERDIQGWVQQTQSGAITNEEFFYRLRQCILDYEIRNNRARQSMLNARNNANKEAVAQEKPLLMVSTIHSAKGLEFDNVIVLQKPSSDAEMTEEGKRATYVALTRAKKRELIIAGSTRAYPRIVTDYEQIVDLLEKRDEERKIKEEEAAALATLEAEQETRALAAAEAQAQALLLEHNPWLRDLSDEEVTALTEQEIINNVEAALQIEEEEEEARALAAAEPAIQQYLSQFAFDEFPDDDNVANTVVHVAPQPILHQAVPADVTVQSSTAPVTPVVADLEVTTVAADPVEPTIVAAQPEVDDNLVYSTSTPNSHSDVIAVNSDTSENAAVNPVLSDIEALRAIFNNQD

SEQ ID NO: 45 - DNA, 5068 bp, Corynebacterium glutamicum
  CDS (101)..(5038): RXA01772
ccagaaggaatcctcccgcaccggctggctcgttagcctgaagtagcacttcgaatctaagaccaccaaatggacatgtcctttgagtgaataggacacaatggaatgcatgtccacgattactgatgctgtatccgccctgcgcacactgccttcccagtctgcgcagggtttggcttttgaaaaactcatggtcaacttcattaagtctgaccccactctctccactgagtttgatgaagtccatcgttgggtcgattggccatataacggtggcaccatggatactggcatcgacttagtggcttataacaaggacgatgatgcttatacggcgatccagtgcaagttttatcttcccactacttccctggcaaaaggacagctagattccttctttgaagcctcgggacgcacttttgaaacccctgaaggaacacgctcctttagcaatagactcgttatttccactactgataagtggagttcaaatgcggaaaagatgttggagaaccaaaccattccaactaaccgcattggtctatctgcaattgcggaatccccgattgactgggatattgcctatccaggttctgaattaactattaacctgcagcttaaagagccgtatagccctcgtcctcaccagcaaactgctattgaaaaagcaattgaaggcttccaaactcatgaccgtggcaagctcatcatggcttgcggtaccggaaaaacctttactgccctgcgtctttctgaagaggttgcgcgactcaatggcaataaagctcgcattctttttctagtcccttccatcagcttgctttcgcaaacactcaaagagtggactgcacaaaagacaatggatcttcgtcctgtcgccgtatgttctgactccaaggtctccaaggctgcagaagatattgctgcttatgatcttgaagttccggtaagtactgatggtgcattgattgcggaaaaactggagcatcgtaagcgagcagcaggattgaccgtggtgttctctacttaccagtcccttcctgctgttcacgcggctcaagaagctggggctgagccctttgatcttgtcatctgcgatgaagcccaccgcaccacaggcatcaccttggctggagaagacccttcaaacttcacccgcattcatgacgcttcttatatcaaggcagcaaagcggctgtacatgacggcaaccccaaggcttttcgacgactccgtgaagggcaaggctgcagatcattcagctgaagtttcttccatggatgatgaagcaatctacggacccgaatttcaccggctgggttttggggaagcagtagaaaaaggcctgcttactgactacaaagttgtagtgatgacagttgatgagcaagttgcagccagtgccttaactgttttgggttcaacacctggtgaagaactcactctggacatgacttccgcaattattggcgcgtggaatggcttggcaaagcgttcgggtaaagagcaagacaccaagactggtttctcaagctctgacgcagcaatggaacgagctgttgcatttgcgcgagacattaagacttctcagcaaatcgcggagtcttttccacgagttgtcaatgcttatacgactgagcttgaggttaaaaacgatgacgtagatgagcacaacctcaatttgagcgtggcatgccagcatgtcgatggatcaatgaatgcgctggaacgaaactctcgtttaacttggcttaaagctcctacccagtcaatggaaaccaagattcttactaacgcgcgctgcctttctgagggtgtcgatgtaccggctttggattccgtaatcttctttaatccccgtaattccatggtggatgtggttcagtcggttggccgagttatgcgtaaatctccaggtaagaattacggatatatcatcttgccagttgctgttcccccaggtgttgcaccatcagctgcgttaaatgattcacgccgcttcaaggttgtatggcaggttcttaacgcccttcgtgctcacgatgaccgttttaacgcaatggtgaactccattgcgctcaatgagggaaatattaaggatctacctgttgagactgagcatactggccctacaagtaaagatagagataacgcaccctatgacagtgctgaatccgctacacaatacgtactgttctctttagaacagtggcaagaagcgatctacaccaagcttgtagataaagttggtacccgaacctactgggaagattgggcagatgatgttgctgacatcgcccaagcacaaataacccgtattaaagcgctcttagacaatgcttcaccaacgatcaaagaagagttcgagcgatttgttgaaggtctacgtggcaacctcaatgagtccatctctgacgacgaggcaatcagcatgttgtcacagcatctgatcaccgcaccagtgtttgacgctctatttgctgaatcaagcttcgctaagcaaaaccctgtttcccaggttatgcaacgcatggcagatgctcttaatagtgctgaacttaactctgaaacggaaaaacttgagaagttctatgactctgttcgtatccgtgctgctgaagtaagctccgcagctggtaaacaagcagtaattaaagacctctacgaacgattctttaaaaaggcctttaaaaagcaatctgaagctctaggtattgtctatacccctgttgagatcgtggactttattctgcgagctgccgatgatgtgtccaagaagcattttggtcgtggcttaagcgataaagatgtccatgttcttgatcctttcaccggtacgggtacttttatggtgcgtttattgcagtcaggtctaattaagcctgaagatttggcccgtaaatatgccaatgagctgcacgctactgagatcatgttgcttgcctattatgttgcggccgttaacattgagaccacttattttggtctcgagggagagcgtgctctgcgtaatggtgaagatgcgccggtctatgagccgtttgatggcattgtgttgggtgataccttccagatgtatgaagacgatgacaaactcgatctagatgtttttactgctaacaatgaccgtatggagcgtcagagacttactcctgtacaggttattgtgggtaacccgccttactctgtggggcaatcgagtgcgaatgacaataacgcaaacctcaagtaccccactcttgatcgacgtattgaagattcttatgcgaagtattcgaccgcaacaaataagaactctctgtacgactcctatttacgtgctttccggtgggcaacagatcgtattcacacacaaggggttgttgcttttgtttctaacaacggttgggttgacggcaataccgctgatggtgtgcgcctaagtttggcacaggacttctccgagatttatgttttcaaccttcgtggcaattcccgaacaggtggtgatttggctaagcgcgagggcggcaacgtctttaatgtccgtgtgggtactcaaatcattgttgccgtgaaaaacccacaattgtctggttgcaggattctttataaagatattggtgacaatctcagcgcggatgcgaagttgaacgagattgccgttgccacaattgagggcgctgagtggcagactatttcgcctaatgaatatggagattggatcagccagcgctctgtagattttgatacctggcctgtactcggtgataagaaaaacaaatctgcattaaaggtttttcaaaccttttctgctggtctaaagactggccgcgatgcctggtgctatgggccaacatctgcgcaggtaaaaactaatatcacccggttattagaaacctatgaacaagctcagcaacggtttaattcgtgggttgtggataacggagtgacatctcctaaggaagctgacgttaatcaattccttaagcagaaccctgatttagcggatagcaagaaaatatcctgggattccaatctaaaaatgtccttgtcacgcggtgatactttttcttttgatccaagcagcatccaaatgtccttgtatcgtccatttttccctcaacagacatacttccatgtttcattgaaccagcgtcgataccagttaccgtcaatgttcccgaccccggaacatgacaaccagggcttttatatcgtcaacccaggtagtgccaagccattctctacccttgcaacaaatctacttccagatcttgctatgtggggttctaacgccggacagttctttacccgatggacttgggaacccatcgaaactcgagaaggcgaattagacttcggtaatggacttttctccacaaccccaaaaaagggagttgaaggcgagatccttgacggttaccggcgcgtcgataacatcaccgacgagatcttaaagctctaccaatcaagcttgggtgaggatgtcaccaaggatgacatcttctactttgtttatgcacagttgcatgatcctgcctatcgtgaggcctatgcggctgatctaaagaagatgctgccacatattgaaacccctactgatcgcgcacgctttgatcactttgtgacagccggcaaggaattgatggatcttcatatcaactatgaagatgttgaaccatgggatgtggaggtaaaggtcaaagaaaaagctgatcccacggatcgtgagacctggcgtgttaccaagatgaagtgggctaaggttcgtgatccagagaccaagaaattggtggaggaccataccaccttgatttacaacagctcaatcaccatcagcggcatccccgaagaagctgaaaactatcaactaggttcacgttctgccatcgcatggcttattgaccgttaccaggtgaagaaagataaggcgtccggcattgttaatgatcccaatgattgggctgatgaagtgggtaaccctcgctacattgtggagctgattgctaaggtcacccgcgttgccgttgagaccatgagaattgtagaggagctttgagttttcctactgcagcttccagaagtg

SEQ ID NO: 46 - protein, 1646 aa, Corynebacterium glutamicum
MECMSTITDAVSALRTLPSQSAQGLAFEKLMVNFIKSDPTLSTEFDEVHRWVDWPYNGGTMDTGIDLVAYNKDDDAYTAIQCKFYLPTTSLAKGQLDSFFEASGRTFETPEGTRSFSNRLVISTTDKWSSNAEKMLENQTIPTNRIGLSAIAESPIDWDIAYPGSELTINLQLKEPYSPRPHQQTAIEKAIEGFQTHDRGKLIMACGTGKTFTALRLSEEVARLNGNKARILFLVPSISLLSQTLKEWTAQKTMDLRPVAVCSDSKVSKAAEDIAAYDLEVPVSTDGALIAEKLEHRKRAAGLTVVFSTYQSLPAVHAAQEAGAEPFDLVICDEAHRTTGITLAGEDPSNFTRIHDASYIKAAKRLYMTATPRLFDDSVKGKAADHSAEVSSMDDEAIYGPEFHRLGFGEAVEKGLLTDYKVVVMTVDEQVAASALTVLGSTPGEELTLDMTSAIIGAWNGLAKRSGKEQDTKTGFSSSDAAMERAVAFARDIKTSQQIAESFPRVVNAYTTELEVKNDDVDEHNLNLSVACQHVDGSMNALERNSRLTWLKAPTQSMETKILTNARCLSEGVDVPALDSVIFFNPRNSMVDVVQSVGRVMRKSPGKNYGYIILPVAVPPGVAPSAALNDSRRFKVVWQVLNALRAHDDRFNAMVNSIALNEGNIKDLPVETEHTGPTSKDRDNAPYDSAESATQYVLFSLEQWQEAIYTKLVDKVGTRTYWEDWADDVADIAQAQITRIKALLDNASPTIKEEFERFVEGLRGNLNESISDDEAISMLSQHLITAPVFDALFAESSFAKQNPVSQVMQRMADALNSAELNSETEKLEKFYDSVRIRAAEVSSAAGKQAVIKDLYERFFKKAFKKQSEALGIVYTPVEIVDFILRAADDVSKKHFGRGLSDKDVHVLDPFTGTGTFMVRLLQSGLIKPEDLARKYANELHATEIMLLAYYVAAVNIETTYFGLEGERALRNGEDAPVYEPFDGIVLGDTFQMYEDDDKLDLDVFTANNDRMERQRLTPVQVIVGNPPYSVGQSSANDNNANLKYPTLDRRIEDSYAKYSTATNKNSLYDSYLRAFRWATDRIHTQGVVAFVSNNGWVDGNTADGVRLSLAQDFSEIYVFNLRGNSRTGGDLAKREGGNVFNVRVGTQIIVAVKNPQLSGCRILYKDIGDNLSADAKLNEIAVATIEGAEWQTISPNEYGDWISQRSVDFDTWPVLGDKKNKSALKVFQTFSAGLKTGRDAWCYGPTSAQVKTNITRLLETYEQAQQRFNSWVVDNGVTSPKEADVNQFLKQNPDLADSKKISWDSNLKMSLSRGDTFSFDPSSIQMSLYRPFFPQQTYFHVSLNQRRYQLPSMFPTPEHDNQGFYIVNPGSAKPFSTLATNLLPDLAMWGSNAGQFFTRWTWEPIETREGELDFGNGLFSTTPKKGVEGEILDGYRRVDNITDEILKLYQSSLGEDVTKDDIFYFVYAQLHDPAYREAYAADLKKMLPHIETPTDRARFDHFVTAGKELMDLHINYEDVEPWDVEVKVKEKADPTDRETWRVTKMKWAKVRDPETKKLVEDHTTLIYNSSITISGIPEEAENYQLGSRSAIAWLIDRYQVKKDKASGIVNDPNDWADEVGNPRYIVELIAKVTRVAVETMRIVEEL

SEQ ID NO: 47 - DNA, 433 bp, Corynebacterium glutamicum
  CDS (101)..(403): RXA01949
cctacgacgttctcaagtctgacgacgttgtgttctccgttgaggctctccacaccttcatcaaccgcgcttccggtgcggcacaggaggagcagaactaatggctactatcgccaacccacgcgacatcatcatcgcaccggtcgtttctgagaagtcctacggcctcatggagcagaacgtttacacgttcttcgtctccactgacgctaacaagactcagatcaagattgccatcgaagagatcttcggcgtcaaggttgcatctgtgaacaccgttaaccgtgcaggtaagcgcaagcgctcccgcaccggcttcggtactcgcaaggctaccaagcgcgcttatgtgactcttcgcgaaggcagcgactccatcgacatcttcagcggctccgtcgcttaagacgtcgatagaaaaggacacattatg

SEQ ID NO: 48 - protein, 101 aa, Corynebacterium glutamicum
MATIANPRDIIIAPVVSEKSYGLMEQNVYTFFVSTDANKTQIKIAIEEIFGVKVASVNTVNRAGKRKRSRTGFGTRKATKRAYVTLREGSDSIDIFSGSVA

SEQ ID NO: 49 - DNA, 787 bp, Corynebacterium glutamicum
  CDS (101)..(757): RXA01966
gctgtccaaggccatgaattttgtgtcctctgttgctccaaccgctgtgctctcccctgttatgggctgggtttataagaagatgggttagtttttaaaagtgtctgaatctgaaaacaacacaacaccagcagtcgcagctcgcgatgaccgtctggtctgggtcgatctggaaatgactggtctagatttgaagcgccacgtgatcgtggaggttgcggcgttggtcactgacgctaacctcaacgttttgggcgagggcgtggacttggttgttcacgcaactgaagaagagctcgcgcagatggatgattttgtcaccaacatgcacgaatcctctgggctgactgagcagatccgggaatccgcggtcacgttgaaggaagccgaagatgctgtgctcgcattgattgaaaagcactgcgatccagcccatcctgcaccgctagctggtaactccattgccactgaccgcgcgtttatccgcgaacatatgccacgtcttgatgaggccctgcattaccgcatggtggatgtgtcctcggtgaaggaattggcgcgtcgctggtacccacgcgtgtactacaagcagccggagaagggtttggcgcaccgcgcgttggcggacattgtggagtcgattcgggagttggattactaccgtcgctcattttttgttgcagagcctggtcctacctctgagcagtgcgcagatgatgcgcaggcagcggtggaccgttttgcaccctactttgattagagggttttaagcagcctggtgagttcg

SEQ ID NO: 50 - protein, 219 aa, Corynebacterium glutamicum
VSESENNTTPAVAARDDRLVWVDLEMTGLDLKRHVIVEVAALVTDANLNVLGEGVDLVVHATEEELAQMDDFVTNMHESSGLTEQIRESAVTLKEAEDAVLALIEKHCDPAHPAPLAGNSIATDRAFIREHMPRLDEALHYRMVDVSSVKELARRWYPRVYYKQPEKGLAHRALADIVESIRELDYYRRSFFVAEPGPTSEQCADDAQAAVDRFAPYFD

SEQ ID NO: 51 - DNA, 1255 bp, Corynebacterium glutamicum
  CDS (101)..(1225): RXA02070
aacagcacggatcaggacctcaagatttgtctgaccccactcagggtgatgttgcagacgaattttagggagtatcaaaacttgggactactatcgatacgtgatgactcaagtaaccgaatccgctgtccgcagcgcgctatcccgcgtagaggatccagagatcggtaagcccatcacagagctcggcatggtcaaatcagtgtccatcgacggctctgatgtccaggtggaggtctacctgacgatcgcggcttgcccgatgaaaaccaccattgtcaccaacactgaagcagctctcaaagacatcgacggggttggccaagttcatgtcaccaccgatgtcatgagtgatgaacagcgccgtgcgctccgcgtctccctgcgcggtgaaacttctgagccagtgattccattcgctcagcctggttccactacccgcgtttacgctgttgcttccggcaaaggtggcgtaggaaaatcctccatgacggtgaacttggctgcagccctagccaagcgcgggctgtctgtgggaattttggatgccgatatttacggacactcagtgcccggaatgctcggctcggaccaacgcccacaccaggtcgatgacatgatcatgcctccccaggcgcacggcgtgaagatgatatccattgctcacttcaccgaaggaaatgctcctgtggtgtggcgtggaccaatgctgcaccgtgccatccagcaattcctcactgacgtgttctggggcgacctggatattttgctgctggatcttcctccaggaactggtgacatcgccatcaccgttgcccaattgatcccgaatgctgagttgctcattgtgaccactcctcaggctgccgcagctgaggttgccgagcgagcaggaacgatctctgtgcagaccaaccagaaggttgctggcgtgattgaaaacatgtctgccatggtgcttcctgatggcaccaccatggatgttttcggcaccggcggcggtcaaaagattgctgatcgtcttaccgctgtgacaggtgaagaggtcaaggttatcggatctgttccattggatccgaacctgcgtatcggtggcgatgtgggaaatcctattgcgatttctgaaccacactccccaaccgctgcagcgatcaatgagatcgctgaacacctagctcaccgcaaggtatcgctggtgggtaaaacgcttgggcttggcgttaaataaaagctaaataatatcggtccaagagac

SEQ ID NO: 52 - protein, 375 aa, Corynebacterium glutamicum
VMTQVTESAVRSALSRVEDPEIGKPITELGMVKSVSIDGSDVQVEVYLTIAACPMKTTIVTNTEAALKDIDGVGQVHVTTDVMSDEQRRALRVSLRGETSEPVIPFAQPGSTTRVYAVASGKGGVGKSSMTVNLAAALAKRGLSVGILDADIYGHSVPGMLGSDQRPHQVDDMIMPPQAHGVKMISIAHFTEGNAPVVWRGPMLHRAIQQFLTDVFWGDLDILLLDLPPGTGDIAITVAQLIPNAELLIVTTPQAAAAEVAERAGTISVQTNQKVAGVIENMSAMVLPDGTTMDVFGTGGGQKIADRLTAVTGEEVKVIGSVPLDPNLRIGGDVGNPIAISEPHSPTAAAINEIAEHLAHRKVSLVGKTLGLGVK

SEQ ID NO: 53 - DNA, 3595 bp, Corynebacterium glutamicum
  CDS (101)..(3565): RXA02082
gctcgtatcgcagaccaggtcatgtggacacagttattgagcaatggggcgagccgcgtgacgttgaaggctttgtggagcgctagactttaaccccgttatgtatttgaaatcgttgacgctcaaggggtttaagtctttcgcgtctgcgacgaccctgaaatttgagccaggcatttgtgccgtggtgggtccgaatggttcaggcaaatccaatgtggttgatgcgctggcctgggtgatgggtgaaggttctgcgaagaccttgcgtggcggcaaaatggaagatgtcatttttgctggcgcgggcgatcgtaaaccgttgggtcgcgcagaagtcacgctgaccattgataactctgatggcgcactgcccattgagtacaccgaagtgtcggtgaccagacggatgttccgtgatggtgcaagtgaatatgagatcaatggggcgaaagctcgattgatggatatccaggagctgttgtcggataccggtattggccgtgaaatgcacatcatggtggggcagggaaagctcgcagagattttggagtcccgccccgaagagcgccgagcgtatatcgaagaagctgcgggtgtgctcaagcaccggcgcaggaaagaaaaggcgcagcgcaaacttcagggcatgcaggtcaatcttgatcgtttgcaggatctgacccatgagttggccaagcagctcaagccgttggctaggcaggcggaagcagcgcagcgtgcggcgacggtgcaggctgatttgcgtgatgcgcgtttccagattgctggctttgagatcgtgaagctctcggaaaagctggaaacctctactgagcgcgagaaaatgattcgtgagcaggcggaagcagcacaagagcagctggaagaagccaccacaactcagatggaagtggagatggagttggcggagatcactccgcaggctgaagctgcgcaacagttgtggtttgatttgtcttcgctggctgagcgggtgtcggcaacgatgcgtattgctgcagaccgtgcgagttcaggtgccgcggatgtgccgtatgcgggccaggatcctgatgagttgcttggtcgggccgaaactgctgacaaagaattagaagaactcgagatggccgtggaaatgaccaccgagcgtttgacctccattcaagaggaagccgaggataaggccgcgcaggctcgtgaggctgagcgtgaacacttggcgcaggtcagggcgatttctgatcgtcgtgaaggtgttgtgcgcctgcttgcatctgaggaatctttgcgcacccagcacacgtcagcagaggaggaagctgagcgactcagtgagcagcttgaggagttcatcggccgcattttggatgtggaacgtgaacgtcgcctcaccgatgagcgtaaacagggcgttgacacggatcgtgcgcccttggaagaagccctcaaacaggcaaaacatgaagccgaagcagcagagactcgtcttgaggagcttcgtactaagcgcagcgatctggaaaaagaagtatccaggttgcagtcgcgcattgagacgcttaaccaaaataggccacgttccgatgctgctgatgtggtggattacccgcagctggccacgttgattcgaccgcaacgaaacgtcgataaggctctcgctgccgccctgggtgcgcatgccgaggcgctggctggcgaggctgcggaagggctcgtcgagaagcttatcgacgccggcgttgcacgcaccatcatcgttgatggcacgcaggctggcggcgcatggcgcctggacgcgaacattccggccggggcgagctggctgctcgaccatgttgatctggatccggcgattgccggcccggtaaaccggctgcttgccgacgttgtgcttgtcgacgacccctccctcggccgccaagcaatcgaggatgatccccgtctgcgtgccgttgaccgcaatggtgtgctcatcggcgctgggtggattcaggtcggcaccgaaacctcgactgtggaaatcacagctcaaattgaggaagcagaagctcaacttgctgcggcctctgccgccttggacgacattgccggcacttttgatggcgccctccacgctgccgacaacactcgcgtcgaggtggctgcccgcaccgcagccctgcgcgaactcgacatgaccagggattccatcacccgcgatctcgcgcgcttggacaaacaacatgaggccgccgaatccgagcgcgtccgccatgttggacgcctgcatgctgcggaaacacgccgtgaagagctgcgcgaacagttagaagacatcgtcgatcgactctcccgcgtggaagacgaagaagacgctgacgaaccctcaaccaccgcccgcgaccaagcaaatgccgagctgcaacaaatccgcgccatggaaatggaagcacgccttgcccaacgcaccgccgaagagcgcgccgggcagcagcggggcaagggcgatagtctgcgacgccaggccgagcatgagcgccaagccaaaatccggcatgaacaagccatggaagcccgtcgcaggcgcacccaattggctgcagccgtgcaaaatggcgcacgcgatgtggccgagcgtgtctcagctgcccttgcccaagcagccatcgaaagagatcagcacaaccgcgacaaagcgctgctgacctcacacttagcgcgcgccaaagatgctgtgagtgctgcacgccagcacctcaatcgactcagcgacaacgcccactccatggaacttgcgcgcagccaagctcaagtgcgcatggaggaagccgttgccaaaatcaccgagcaacttggcattccggtcgcagaattgctgcgcgattacaccccagatgaaaactttgatgaaaagttccaacgggcacgcctcaaacaagccgaaaaagacctcgccgcactaggcaaagtcaaccccctggccttggaagaattcaaagccttggaagagcgctacgagttcctctccacccaattggccgatgtggaacaagcccgcgccgatctgagcggcgtgattgaagaagtcgatgcgaaaattctgcagcttttcaccgatgcctggaacgacgtggaagcagaattcccacgcgtgttcaacaccttgttcccaggtggcgaaggcaaactgatcctcaccgagcccgatgatttgctggcaaccggcatcgaagtggaagcccgcccaccaggaaaacgcgtcaagcgcctatcgctgctatccggtggcgaaaaatccctcaccgcactagccatgctcgtcgcgattttccgcgcccgacccagccctttctacgtgatggatgaggtggaagcagcactcgatgatgtcaaccttcgccgacttatcgcactgtttgaagagttgcgccgcgactcccagctcattgtgatcacccaccaaaaacccaccatggatgtggctaacgtactctacggcgtcaccatgcgtggcgatggcgttacccgcgtgatctcccaacgcatggaacctgcttctgcaatggaaactgtggcggggtaaaacctgcgctgagcacggatgatgttc

SEQ ID NO: 54 - protein, 1155 aa, Corynebacterium glutamicum
MYLKSLTLKGFKSFASATTLKFEPGICAVVGPNGSGKSNVVDALAWVMGEGSAKTLRGGKMEDVIFAGAGDRKPLGRAEVTLTIDNSDGALPIEYTEVSVTRRMFRDGASEYEINGAKARLMDIQELLSDTGIGREMHIMVGQGKLAEILESRPEERRAYIEEAAGVLKHRRRKEKAQRKLQGMQVNLDRLQDLTHELAKQLKPLARQAEAAQRAATVQADLRDARFQIAGFEIVKLSEKLETSTEREKMIREQAEAAQEQLEEATTTQMEVEMELAEITPQAEAAQQLWFDLSSLAERVSATMRIAADRASSGAADVPYAGQDPDELLGRAETADKELEELEMAVEMTTERLTSIQEEAEDKAAQAREAEREHLAQVRAISDRREGVVRLLASEESLRTQHTSAEEEAERLSEQLEEFIGRILDVERERRLTDERKQGVDTDRAPLEEALKQAKHEAEAAETRLEELRTKRSDLEKEVSRLQSRIETLNQNRPRSDAADVVDYPQLATLIRPQRNVDKALAAALGAHAEALAGEAAEGLVEKLIDAGVARTIIVDGTQAGGAWRLDANIPAGASWLLDHVDLDPAIAGPVNRLLADVVLVDDPSLGRQAIEDDPRLRAVDRNGVLIGAGWIQVGTETSTVEITAQIEEAEAQLAAASAALDDIAGTFDGALHAADNTRVEVAARTAALRELDMTRDSITRDLARLDKQHEAAESERVRHVGRLHAAETRREELREQLEDIVDRLSRVEDEEDADEPSTTARDQANAELQQIRAMEMEARLAQRTAEERAGQQRGKGDSLRRQAEHERQAKIRHEQAMEARRRRTQLAAAVQNGARDVAERVSAALAQAAIERDQHNRDKALLTSHLARAKDAVSAARQHLNRLSDNAHSMELARSQAQVRMEEAVAKITEQLGIPVAELLRDYTPDENFDEKFQRARLKQAEKDLAALGKVNPLALEEFKALEERYEFLSTQLADVEQARADLSGVIEEVDAKILQLFTDAWNDVEAEFPRVFNTLFPGGEGKLILTEPDDLLATGIEVEARPPGKRVKRLSLLSGGEKSLTALAMLVAIFRARPSPFYVMDEVEAALDDVNLRRLIALFEELRRDSQLIVITHQKPTMDVANVLYGVTMRGDGVTRVISQRMEPASAMETVAG

SEQ ID NO: 55 - DNA, 1747 bp, Corynebacterium glutamicum
  CDS (101)..(1717): RXA02145
cactgccacagctgccaattaccgttgatgaagagggctacctcatcgccgctggtaacttcattgagccactcggccctgcattctgggagcgtaagtcatgagtctagctaccgtgggaaacaatcttgattcccgttacaccatggcgtcgggtatccgtcgccagatcaacaaggtcttcccaactcactggtccttcatgctcggcgagattgcgctttacagcttcatcgtcttgctgctgactggtgtctacctgaccctgttcttcgacccatcaatcaccaaggtcatttatgacggcggctacctcccactgaacggtgtggagatgtcccgtgcatacgcaactgcgttggatatttccttcgaggttcgcggtggtctgttcatccgccagatgcaccactgggcagccctgctgttcgttgtatccatgctggttcacatgctccgtattttcttcaccggtgcgttccgtcgcccacgtgaagcaaactggatcatcggtgttgttctgatcatcctgggtatggctgaaggcttcatgggttactccctgcctgatgacctgctctctggtgttggtcttcgaatcatgtccgccatcatcgttggtcttccgatcataggtacctggatgcactggctgatcttcggtggagacttcccatccgatctgatgctggaccgcttctacatcgcacacgttctaatcatcccagctatcctgcttggcttgatcgcagctcacctggcacttgtttggtaccagaagcacacccagttcccaggcgctggccgcactgagaacaacgtgatcggtatccgaatcatgcctctgttcgcagttaaggctgttgctttcggcctcatcgtcttcggtttcctcgcactgcttgctggtgtcaccaccattaacgcaatttggaatcttggaccgtacaacccttcacaggtgtctgctggttcccagcctgacgtttacatgctgtggacagatggtgctgctcgtgtcatgccggcatgggagctctacctcggtaactacactattccagcagtcttctgggttgctgtgatgctgggtatcctcgtggttctgcttgtgacttacccattcattgagcgtaagttcaccggcgacgatgcacaccacaacttgctgcagcgtcctcgcgatgttccagtccgcacctcactcggtgtcatggcgcttgtcttctacatcctgcttaccgtttctggtggtaacgatgtttacgcaatgcagttccatgtttcactgaacgcgatgacctggatcggtcgtatcggcctcatcgttggaccagctattgcatacttcatcacttaccgactgtgcatcggcttgcagcgctctgaccgcgaggtcctggagcacggcatcgagaccggtatcatcaagcagatgccaaatggtgccttcattgaagttcaccagccacttggcccagttgatgaccatggtcacccaatcccactgccatacgctggcgctgcggttccaaagcagatgaaccagcttggttacgctgaggttgaaacccgcggtggattcttcggacctgatccagaagacatccgtgcgaaggctaaggaaattgagcacgcaaaccacattgaggaagcgaacactcttcgtgcactcaacgaggcaaacattgagcgtgacaagaatgagggcaagaactagtttctaggacttcatctctgaaactcc

SEQ ID NO: 56 - protein, 539 aa, Corynebacterium glutamicum
MSLATVGNNLDSRYTMASGIRRQINKVFPTHWSFMLGEIALYSFIVLLLTGVYLTLFFDPSITKVIYDGGYLPLNGVEMSRAYATALDISFEVRGGLFIRQMHHWAALLFVVSMLVHMLRIFFTGAFRRPREANWIIGVVLIILGMAEGFMGYSLPDDLLSGVGLRIMSAIIVGLPIIGTWMHWLIFGGDFPSDLMLDRFYIAHVLIIPAILLGLIAAHLALVWYQKHTQFPGAGRTENNVIGIRIMPLFAVKAVAFGLIVFGFLALLAGVTTINAIWNLGPYNPSQVSAGSQPDVYMLWTDGAARVMPAWELYLGNYTIPAVFWVAVMLGILVVLLVTYPFIERKFTGDDAHHNLLQRPRDVPVRTSLGVMALVFYILLTVSGGNDVYAMQFHVSLNAMTWIGRIGLIVGPAIAYFITYRLCIGLQRSDREVLEHGIETGIIKQMPNGAFIEVHQPLGPVDDHGHPIPLPYAGAAVPKQMNQLGYAEVETRGGFFGPDPEDIRAKAKEIEHANHIEEANTLRALNEANIERDKNEGKN

SEQ ID NO: 57 - DNA, 2557 bp, Corynebacterium glutamicum
  CDS (101)..(2527): RXA02293
gtggggatatccgcttcgccacgaaggaaaaatttactttccacaacccgctagaaaacacatcatcgccttaggtttctctgtagaagttaggaaaaagatgtgttcactcagcaaattcttaatgtacaggcaattgatgagttcaagaattggcaattttcttataaatcgcatttccacgggcctgcccgtagaaaatattatccctcacctgcaagaagctttttcggccggacctaaaaaccttgtcattcaggcccctcccggcacaggaaaaacgacacttctccccccattagtagctaacatcttatgtaatgaaggagcgggaaatgccaccccaaccaaggttttagtaacggcacctcgtcgtgtggccgtccgagcagcagctcgcagactcgcccaactagatgatagccagctcggaacaaaagtgggattcagcgtgcgtggtgaacatatttcaggctcccacgtgcaatttatgacccccggtgtgttaatccgccagctcttaaacaacccagaattacccggcatcggcgctgtgattatcgatgaagtccacgaacgtcaactcgattccgatctactgctaggaatgcttgctgaactcagtcaactgcgcgacgatttctccctcatcgccatgtccgcaaccttagattcagataaattcgcaaacttattagacgctcaggtccttagtgttgaagcaccgattttccccttagacatttcttatgctccagcccgcgcgcctcgcctcaatgcaaaaggtgtcgactgggatttcctcgaccacatggcgcagaaaactcacgatgcggtgacacattcagagcactctgcactcattttcgtcccaggtgtgcgtgaaattgatcgagtaatgagcacgctcaaatcgctcggccataataatgttttcccacttcatggccaactcagcccgaccgaacaagaccgcgccctcgcaccgtcacaacagcagcgcatcattgtctccactcccgttgcggaaagctccctaactgtgcctggagttcgcatcgtggtggattccggcctctcacgaagccccaaacgagactctgcccgcggcatgacaggactgatcaccagcagttgcgcgcaggcttcagcaggccaacgcgcaggtcgcgctggccgtgaaggaccaggacaaataatcagatgctattccgaagaagacttctcccacttcccacgatttgtgacaccagaaatcagctccgctgacctcacccaagcagccctctggctcgcccaatggggaacgtcacctgcggatttaccgcttcttgatcaaccccctcacgcagcctggacggctgcacaacagatcctgcgcctcatcggcgcgcttgaaggtgacgctatcacgagcctgggacatcgcttatcgacgcttcccctctgccctcaactcagcgcttctctcctccgcttcggtgaacaatccgcaaaaatcttggcggtggtgtccgaaaacccgcagggggacgtcgaaaagcaacaacccgacaagcgtgaagtggaacgccttcgccgtttggcacctgcgtcggttggaaaagcgagtgcggggcaaatcgtaggcgctgcattcccgcagctcatcggccgaaaaatagacaatggagaataccttttagccagtggaacccgcgcacgcctcatggattcagatctcaaagatgccgaatggatctccgttgctgcaattaaccgctcacaaaattctgccatcatccgcgccgccgcccgcatttcagaggacgatgccatagacatcatcggagtcgtggaagaaacccgcgcgatttttgtcaacggaaaagtccaagcccggaaggtcaaagcagcaggcgcgatcgaattaagttccactccgacaaaaccaacacccgccgaagcctcggaaacaatcgccacagcccttgccaaaggcggaatcgacctattccacttctccgacaaagcggcatccttgcgtgaccgactgaaattcatccacgaacaccgtggcgaaccctggccagatattgaaactgcggacccgcacctgtggttatctccagaaattgaggcgctcagccacggaacacgactaaacaatatcgatatgtatcccgcactccagcgacttctcccctggcctgaagcaaccaactttgaagaattcgctccttcccacctatccgtacccagcgggaatcagcaccgactagattattcatcaggcaggccagttatacgagtgaaattacaagaatgcttcggattagaagaatccccgcagctctgcggaatcccggtgcaatttcatctcctgtcacctgcgggaagacctcttgcagttaccgatgacctgcgtagtttctggtctggcccgtacagccaagtccgtgcagaaatgcggggccggtaccccaaacacccgtggccggaggatccatggaccgctcctgccactgcgcgcaccaagaatcgcatgtagttttggcacgacttgatgtgagccgat

SEQ ID NO: 58 - protein, 809 aa, Corynebacterium glutamicum
MCSLSKFLMYRQLMSSRIGNFLINRISTGLPVENIIPHLQEAFSAGPKNLVIQAPPGTGKTTLLPPLVANILCNEGAGNATPTKVLVTAPRRVAVRAAARRLAQLDDSQLGTKVGFSVRGEHISGSHVQFMTPGVLIRQLLNNPELPGIGAVIIDEVHERQLDSDLLLGMLAELSQLRDDFSLIAMSATLDSDKFANLLDAQVLSVEAPIFPLDISYAPARAPRLNAKGVDWDFLDHMAQKTHDAVTHSEHSALIFVPGVREIDRVMSTLKSLGHNNVFPLHGQLSPTEQDRALAPSQQQRIIVSTPVAESSLTVPGVRIVVDSGLSRSPKRDSARGMTGLITSSCAQASAGQRAGRAGREGPGQIIRCYSEEDFSHFPRFVTPEISSADLTQAALWLAQWGTSPADLPLLDQPPHAAWTAAQQILRLIGALEGDAITSLGHRLSTLPLCPQLSASLLRFGEQSAKILAVVSENPQGDVEKQQPDKREVERLRRLAPASVGKASAGQIVGAAFPQLIGRKIDNGEYLLASGTRARLMDSDLKDAEWISVAAINRSQNSAIIRAAARISEDDAIDIIGVVEETRAIFVNGKVQARKVKAAGAIELSSTPTKPTPAEASETIATALAKGGIDLFHFSDKAASLRDRLKFIHEHRGEPWPDIETADPHLWLSPEIEALSHGTRLNNIDMYPALQRLLPWPEATNFEEFAPSHLSVPSGNQHRLDYSSGRPVIRVKLQECFGLEESPQLCGIPVQFHLLSPAGRPLAVTDDLRSFWSGPYSQVRAEMRGRYPKHPWPEDPWTAPATARTKNRM

SEQ ID NO: 59 - DNA, 6430 bp, Corynebacterium glutamicum
  CDS (101)..(6400): RXA02357
tatacctttgaatatcctttccgggtgttggatcgtgaagctgatctgcgtgctgcatatgcaaaatttgaaaaccagctaaaggagccatagagcgcttatgtcctcactcattcctgtccatgcggctggcagcattcaagaaggcatcaccgaatatttgaccaccagtttttcccttgcggataagcaagtggccaccgagctcaagcggttcttgggccacggtgattccggcatgttccacgggccttatgtgcgtgcacgtttgccctatgctcaggcacaggaatgggaaaatgtgctgagttggttacctgagaactttgtgccctatcaccatcaaaaagcggcgtttcagcggctgagttccctcgataaccgaggtaaagatcgccgccccgatcccaccttggtggtaactggaacgggttccggtaagacggaatctttcctctacccgattctggatcatgccctgcgcctgcggaaacgtggccaacaaggcatcaaggcgctgttgctttatcccatgaacgccttggccaatgaccaggcagatcgtttggcgcggctcattcacaataacccagcacttaaaggtgttaccgccggtatttataccggtgaagccaagggcaatcgcacgcagatgggcgaaagggagcttattaatgatccccaagccatgcgggttagtcccccagatattttgctcaccaactacaaaatgttggatcagctcttgctgcgcagcgtcgaccgcgaaatgtggcaaaaatccgccacctctttgcagtatttagtacttgatgagttccacacttatgacggtgctcaaggtacagatgtggcgttgttgttgcggcgtttggggctcatgctgaaatcccagcagcctgctaattttttggatgatagtgccatgcaccggccattgggcattattacgccagtggctacctcagcaaccttgggttctggtgattccggctcccccatgttggattttgcttacaccatttttggtgagcgttttccagctgatgccatcgtcggggaaactcgcctggagctggatcaatggcgcgcagaaattgcccagaattttggtgccccagcagttagcgagccccgtgagctacccactgtggaagatattgaggtggttttagataccatcgccacagctcaacatgaggacgattatgcacagctctgcttccgcgttttttgtgagaaagtgtggctgtgtgaggctgatctgcacgcagcgatcagtgcttatgcggctcatgatttaactgctgcgattttgcagcatgctgctgattccaccccgcttagcaggcgtgatcaagatgaggtcactgcccttccggagctggtattgggggctaccgcccgcatcttaggtgaggttaaagctgcggaatttatcagccatgcactggctgccatggcatttgtgcgcgcggaatacggcaaagttgccgcctggggtgccaagcgcctacctggcgtcgaaacgcatctttgggtgcgcgaggtctcccgcattgaccgcgccctgggggttggggatgaacaatccatgtttcgctggtccgatgatggcccggcagaagatgccaatacccaacaatggttgccggcgtgttattgccgcagttgtggccgttccggctggatggtcagcctggaacaaggcaccaatatcccggtgttggaagaacaaaaaattcgcctcaactcctttgaacaaccccataaacaaagagcgcttctcgacgccacctctgagcagcgcgcagccattgagcaggggcgcagcgttgctgggccgcgaggagttgatggcacctcagcagtgctgtggttccatagcgccagcaatgaactcagcacgcgccaacccagcccagaagaagaacaatcaggttcttctatcgcagtgctcacccactttggccctgaggcagacgatctctccgccaaacagacctgcccttcctgtggtgatgttgattccatccgttatatcggatcgggaatctctaccctgctctctgtctcactctccaatctttttggtatggccgatttggatagcgctgagaaaaagacgctggtctttgccgattccgtgcaagatgccgcgcaccgcgccgggtacgtccaagcacgttcccgcgcttttgcccttcgtacctatacccggcgcgcagtgggtgataatgaagtcaccttgccatcaatctcccgggcgctgatggataacgccacctctgggcgcacccgttatgagctcctaccccctgacctgaccgatcttgatatttacaaaccttattggcaccccgatgccagcaaggctgagcgccgtgaggcctcccgcaatgtgcataaacgtttaagttttgatctcgccctcgagtttggacaacgcgctgatctaccccgttcccttgcgctgaccggcgctttgagtgcttttgtggatttgcccaaaggtgttgcattgtccgcggctgccgaagcactttatgccatcgaagttcccaccttagatattgaggatgagaacctgcgactgcgctgggtgcaaggtgccctggaacttttgcgcgcccgcgggggcatcaaccatgagtggtttggcgcctacctgcgcaccgatggcaacccctatatgcttaaccgccgccaagcccgcgctgagggcattcccggttttgtccgcggtggtgcacctgaattcccacgtgtaggttccgcactttccggatccctgcgttccagcaccggcaccaccccgcttggtagcccgcgcggacgttatgcgtcctggacctcgcaggtgcttggcatcagcacccacgatgccgccaccgccatcacaaagcttttcgacgctttaagcaaccgcagcattctctcctcaatatctaccgacagcggcggaaaaatctactgcctcgaggccgaacgcatccgtatttttagcgaagaccatcccgaagttctggaatgcagcgtgtgccatgcccaaactggtgtaactgatcatgtgcgtgaacttcttgatggcgctccgtgttttagccctagttgtgggggcgttctccataccgaggaagtagaagacaactactaccgcaggctttattccgcaattgaaccgcgcactgtcattgcccgcgagcacaccagcatgctcaagaaaaaagaccgcctcgcactcgaacaatcctttagaggtggagaaggctcggccaaacaatcccccgatgcgcccaatgtgttggtagctacgccaacgctggaaatgggtattgacatcggcgatctctccaccgtgatgcttgcgtctttgccaacatcagtggccagttatgtacagcgtgttggtcgtgccgggcgcctcagcggaaactcgttggtactcgccgtggtgcgtggccgcggtgtcacattgcctcgtcttaaccaaccgctctccatgatcaagggagctattaccccaccagttgcgtatctttccgccagtgaaatcttgcaccgccaattcttggcatatgtgatcgactgcttagatactcgcgccgaactgccaaaactcgaaacagcaattgatgtttttgataatgccgccggaaaaacacctttggttgcattactcaaagcgcagattcacgcaggcctagatcctttgctggaggaatttgtacgcaccctcaacatgcaaatcagcattgataatattttcgaactgcgcacttgggcatctggaaatagcacagactccctcctcgcgctgctggaaacctcccaaaaagagtggatggaagaacgccgcagccttaccgcgcggcggggagaactcgaaaaaatctttgacaaactagatgcgcgcaatgatgcacatgatgaagagctaaaggaagaaaaacgtaaaaccgcagcttcccttaaagccgtcaaacttcaaatccgtgatctacttggtgaattctggatcgctgctttggagcgttatggtctcctgcccaacttcaccctggttgatgattccgtagaacttaatgtggcggttacttcgttcaacccccaggaagtggaatttgataccaagaatcatgcctactcgcgtgggatctctgcagcgctttttgagctcgctcccggtgcgaccttttatgcccaaggaattgctgccaaagttgattccattgagattggtgaacatggctctgccattgagcaatggcggttgtgccccgtgtgctcgcactccgaaatcctccagccgggtgtctctacaccgggatcgtgtcctacctgtggctcccccgcctttgccgataagggacaaatcctagaggtagtgcaaatgcgtaaggtttcctccgcagtggagaaaactcgcgctgccattagcgatgaccgtgaagatcgctttagcacccgctttaaccagcacgtcagctttgtcgttccaccagatggccatggaaaatcctggtatttgaatgatggttttggcattgagcatctgcccaaggtggaattacgctggctgaacttaggaattggcaatggccaaaagcgtcggctcggtggctttgaagtcaccagcccactatttaatgtgtgccgccactgtggacatttagattccgaggcaggagctaactcacgctgggatcaccgaccctggtgcccacaccgttatgagcaaaaagaagataccgtatctttcgctttgggtcgtactcttaaaacccaaggcgtgctcatgctgctgcccgaatattttggcagtgaagccgattctatggtggtaaccagcctcattgctgctatcaaattaggatttcgtgaggtgttgggtggcgatcctgaccacctggatgtcaccagtgtgcaggtcccccgtacttctggcgatggtgcacttgatgcccttttgctgcacgatcaggttccaggaggcacgggttatcttaaccaatttgccgatcctacaaaggttcgtgaacttatttcccgagcttgggagcgggtgtctaggtgccaatgccagtatgatgaaaggctggcctgcccagaatgtttgttgccttatacccgcactgccacgctcctccagacttcccgcgcagctgcagaaaaagccttgcgcgcaattttgctcaatagctcgcgccccgaagaaatcactgacctttctgcagtaccggactggactttcttggaaaagcgcccagagaacactcttggctctcagttggaactgcgtttccgcgtgatgctgcgacgcgccttaaaaaatcgccatgccaaacttgtggaccgcgtcaacggctcaaactcttatgtggatattgagatgagctccggtgtgcgctggcggatgagcgaacaagttgatcgtggatatacacgccctgatttctggtttgaaccgctcaacggcaactatcccaccgtggctgtttttaccgatggcgctgcgttccatatctcttcagctaactaccgtcttgatggcgatattcagaaacggatgaaactagcgctcgatccagacaatattttgccgtggaatatcactagcttagacctcgaccgctttagtaatcccgctgcacaaggtgaggaaccagcatggtttagccccatcggcaggcagctcagcaaagcaaatttgattcttgatccacaatcaactgcactcctggcagcaacgcctatggatcaactcttggcatttttagataatcccgcggcatcctcgtggaaggagtttgctcatatcgctgctgctcacatgcttgggcataatccacaaaaaaatggcgacggaattgttggtaccttccgcaataagatttccttgcgggccaccatggttaatcgggaactgcgcgcccgccaattgtggcttgctcccaccactccagaagagctggaagtggatacctggactgccttcctcaatttggccaacctcatgtggctggcaccggaatccgtagacgtaagcactaatggttcaccgcataaaattgatattgtgcctgctccagcagctccgcttgctgttgaagttcctgaattgtgggctcccatcttggatggctttaccgccgatgaagatgaagaagccgaaggcgctttgcagatcttggctaaggaacatgccctggttccagagaccaccggtgatgagctctcgagtattcctacgattgctacgtggccgagtgtcaagatcgctttgctctatgaatctgatcccgatgagcctttggaggatgatctcaaagctgaaggttggacgctgctttttgcaaatgacctcgagacctccgatattcccgctgcccttcgtccctagtacacccaaagtttatgaaagataaaa

SEQ ID NO: 60 - protein, 2100 aa, Corynebacterium glutamicum
MSSLIPVHAAGSIQEGITEYLTTSFSLADKQVATELKRFLGHGDSGMFHGPYVRARLPYAQAQEWENVLSWLPENFVPYHHQKAAFQRLSSLDNRGKDRRPDPTLVVTGTGSGKTESFLYPILDHALRLRKRGQQGIKALLLYPMNALANDQADRLARLIHNNPALKGVTAGIYTGEAKGNRTQMGERELINDPQAMRVSPPDILLTNYKMLDQLLLRSVDREMWQKSATSLQYLVLDEFHTYDGAQGTDVALLLRRLGLMLKSQQPANFLDDSAMHRPLGIITPVATSATLGSGDSGSPMLDFAYTIFGERFPADAIVGETRLELDQWRAEIAQNFGAPAVSEPRELPTVEDIEVVLDTIATAQHEDDYAQLCFRVFCEKVWLCEADLHAAISAYAAHDLTAAILQHAADSTPLSRRDQDEVTALPELVLGATARILGEVKAAEFISHALAAMAFVRAEYGKVAAWGAKRLPGVETHLWVREVSRIDRALGVGDEQSMFRWSDDGPAEDANTQQWLPACYCRSCGRSGWMVSLEQGTNIPVLEEQKIRLNSFEQPHKQRALLDATSEQRAAIEQGRSVAGPRGVDGTSAVLWFHSASNELSTRQPSPEEEQSGSSIAVLTHFGPEADDLSAKQTCPSCGDVDSIRYIGSGISTLLSVSLSNLFGMADLDSAEKKTLVFADSVQDAAHRAGYVQARSRAFALRTYTRRAVGDNEVTLPSISRALMDNATSGRTRYELLPPDLTDLDIYKPYWHPDASKAERREASRNVHKRLSFDLALEFGQRADLPRSLALTGALSAFVDLPKGVALSAAAEALYAIEVPTLDIEDENLRLRWVQGALELLRARGGINHEWFGAYLRTDGNPYMLNRRQARAEGIPGFVRGGAPEFPRVGSALSGSLRSSTGTTPLGSPRGRYASWTSQVLGISTHDAATAITKLFDALSNRSILSSISTDSGGKIYCLEAERIRIFSEDHPEVLECSVCHAQTGVTDHVRELLDGAPCFSPSCGGVLHTEEVEDNYYRRLYSAIEPRTVIAREHTSMLKKKDRLALEQSFRGGEGSAKQSPDAPNVLVATPTLEMGIDIGDLSTVMLASLPTSVASYVQRVGRAGRLSGNSLVLAVVRGRGVTLPRLNQPLSMIKGAITPPVAYLSASEILHRQFLAYVIDCLDTRAELPKLETAIDVFDNAAGKTPLVALLKAQIHAGLDPLLEEFVRTLNMQISIDNIFELRTWASGNSTDSLLALLETSQKEWMEERRSLTARRGELEKIFDKLDARNDAHDEELKEEKRKTAASLKAVKLQIRDLLGEFWIAALERYGLLPNFTLVDDSVELNVAVTSFNPQEVEFDTKNHAYSRGISAALFELAPGATFYAQGIAAKVDSIEIGEHGSAIEQWRLCPVCSHSEILQPGVSTPGSCPTCGSPAFADKGQILEVVQMRKVSSAVEKTRAAISDDREDRFSTRFNQHVSFVVPPDGHGKSWYLNDGFGIEHLPKVELRWLNLGIGNGQKRRLGGFEVTSPLFNVCRHCGHLDSEAGANSRWDHRPWCPHRYEQKEDTVSFALGRTLKTQGVLMLLPEYFGSEADSMVVTSLIAAIKLGFREVLGGDPDHLDVTSVQVPRTSGDGALDALLLHDQVPGGTGYLNQFADPTKVRELISRAWERVSRCQCQYDERLACPECLLPYTRTATLLQTSRAAAEKALRAILLNSSRPEEITDLSAVPDWTFLEKRPENTLGSQLELRFRVMLRRALKNRHAKLVDRVNGSNSYVDIEMSSGVRWRMSEQVDRGYTRPDFWFEPLNGNYPTVAVFTDGAAFHISSANYRLDGDIQKRMKLALDPDNILPWNITSLDLDRFSNPAAQGEEPAWFSPIGRQLSKANLILDPQSTALLAATPMDQLLAFLDNPAASSWKEFAHIAAAHMLGHNPQKNGDGIVGTFRNKISLRATMVNRELRARQLWLAPTTPEELEVDTWTAFLNLANLMWLAPESVDVSTNGSPHKIDIVPAPAAPLAVEVPELWAPILDGFTADEDEEAEGALQILAKEHALVPETTGDELSSIPTIATWPSVKIALLYESDPDEPLEDDLKAEGWTLLFANDLETSDIPAALRP

SEQ ID NO: 61 - DNA, 4930 bp, Corynebacterium glutamicum
  CDS (101)..(4900): RXA02363
ttcctcgtctcacaggatttgacctggtgagtgccgaagcgaaagtgctcagcgcaataaacaacaacaatataatcccaactgcaatttaaggatcactatgtccaacgcacctaaaaagagcttttcagacttcttttccccactagcaaccgaaactgaaacaactattacgctctcggcaattgaggtagagaaagtcaatgccaagactgaagtcactcgaaatattgatccagtcgaagcagcagaacaaatcagccgcgactaccgccgctacctgaaaacacttattagccccagtaataagacaattgcggcagaattcaaccgagagattgatgagtccgaaaaccttgtctacggaccaattttgcagctgactccgccttatgcaccaggtaagtcccctgctcaattaattgatgagggagtcctttctccaaacttctcacgtctcgatgccgcactacccaaagatcgcccgctttatcagcatcaggaagacgctctgcgaaaaatcgctagtggccgaaacttaatcgtttcaaccggtacaggatctggaaaaacagagtctttcctcatcccgatctttgaccaactgctccgccaacaacaagccggtgagttaaatcctggtgtcagagcattgcttctttaccctatgaatgctcttgcaaatgatcaggagaaacgtctccgcgaattattggcagacaccccggaaattacttttggtcgatacaccggagataccaaacagacccgtgaagaagccgagaaatacttcaaactgattaatgggcgaaatgcgacccctctacctaatgagctaattagccgtgatgagatgcaggaaaatccacctcatatcttgctcaccaactacgcaatgttggaatacctcctgcttcgtcctgcagacaacgcattcttcgatgatgcatattccaataattggaagttccttgttcttgatgaagctcatgtctacgccggagcacaaggcactgaagtcggcatgctgatgaggcgcctgaaagatcgtgtccaacgaggaaatcccctccagtgcatcgctacaagtgcttctttggaaggaactaaagaagccatcatgacctttggacaagacctctttggtgaaccttttgagtttgtcaacgaagatccctcgcgccaggatttggtatccgcgcatcggagaaaactaccaaaaacctttacgtggtccctaccagatgagctctttgaccagcctttagaaagtgatggtcttttccaagcactacaagagcgcggtggagatcaatacgaagagctctccaaagaagaacacatcgtaaaactccgcgaactatcccagcaatcaagcactcgagttgaagacatcggcaagggtctttggccaaatgttactgataaagcatcaatgcaccgcacacatatgctggtgaatttaggcagtggcgttctatcccatgatggagtaccagctctgtccgcgcgttatcacatgtttgtccgcgcagttgaaggcgcttttcttgggtatacagagcaaggaaagccaatcgtgtccttggaccggcaagtgacattaggcgacacagctcgaccaatgtatgaaatgggtgcttgcatcaaatgtggaaccgttcatatcagcgcccataatgattctggtttccttgtgcctccagagaattcctcaaatttcgacgaacaacagctcaaatgggtagtcctcaccgatgatttcgaaacagcagacatcgacgaagatgacctagaaactgatgctgacgagaacgtcaaagtccttgagctacaaaaattatgtacggcctgcggaaaactaaacggaaagaactctcttctctgctccggatgctcatcacatcatgaccagtttattgatgtaaagatcttggaaccccggaatggtagccaattaacatgcactcgatgcggtggccgagaaaagaacctgattcgacgactccgaaccgattcaaatgctgcaccttctgtcctcaccacatcattgttccaactgttgccagaatcagctgatcaagatacatcacgcaagatcggtgctggacgcaaactactcacgttttctgactcccgccaggctgccgcttacgcagcaccatatttgcaagcaagttacaccaggttgctagagcgaagaatcctcattgagaccctgcgggatgaagaatttactgaaggcgcatccattgaacgatggatttcccgcgcaagtgaagtggcgaaaaacaatcgagtcctcgctaacaacttgaacccacgcgaaacactagaacagacaggtaactgggtattcgcagatcttgcttcgacagtccgacgtagttcgactgaagggcttggactagccaaaattgaactgacccctgaggctttgtcgcaactcagtttcagaaaaccacttggcgagatgtttggggatccggatgccgccgacgccttttttaatctcttcgctcaagaattccgtcacaagggcgcaatcaattgccctgactacgtcaatcttgaggatgaacgctttggccctcgtcgtgggcagcactttttcaccaaagatggtggaagaaaatcaacacgacgcctctactcatggattccgcaacgaggaaccaacaatcgcaaggacttcattacaaaagtcttgaaccgcatcggacaagcaggtgacgaaggtgaaaatattacgacgcttctccatcacctatggaatgactacactaattccgaaattttgaaggtcccaggcgaaaaggccgaaggctacacacttaactacaactcactgcaagtaagccctggaaaacaacattcctggtatgaatgtgacacttgtagaaatacaacgccatttaatgttctcgggctgtgtccacatgggttctgtaaaggcaagctaaaagaaatcgatacttctttaccggagtatgccaacaatcattatcggaagttggcaacatcgcttgaaattcttccgctttcagccaaagagcacactgctcaatggacgccaacggaggctgcagaggttcagaaagaattcatcgaaggaaaaatcaatgtcctaagctgttctactacgtttgagcttggagttgacgttggtgatctgcagtcagtaatgatgcgcaacgtaccgccacgtacggctaactatgtgcaacgtgcgggacgtgcgggacgccgatcaggttcagcagcttttgtgcttacctttgctaagcgatcttctcatgacttggctgtatttaagaacccaacccagatgattgatggcgaaatgacagtgccatttttgcacattaacaatgcccgaatcgcccgtcgtcacacctattcaatcgctctcgccgcatttttccgagagcaggctgcccaaaatcggttctggaaaaaggccggagagttcttccttggcactgatgcagctccataccttaggcctgctgtcgcagagcaagaggcaacggagatcctcgaagagtttctctcccctgttcctaattacatcactgaagccctccgtcgcgtattccctgagtccctgcatgaggatctggatattgaaaatcaaggttgggttaaacaattccttgaaattttcgatacaactcgtcaggagatctccgaagatttccaaacgcttaaaaagatgcaagggcgagcgctgggcagtgaacaaggcaaaaaggcagatgccttcaaacgcacaatcacaactctgatggaccaagatcttttgggatacttggccaagaagaacatgctgcccaagtacagcttccctgtcgatacagtagatcttcaaacaaacttcagtgaagctggaaataaggtgagcttgtcacgagatcttcagctagcgattaccgactatgctcctggtgcggagttagtagcaggcggaaaattgtggaaatccgctggcattcgacacctagccggtaaaaaggtggaaactttttattggacaacgtgtactgagtgtaaacatactgaaacctctcgttttggatttacatctgaagatgtctgttctcagtgctctgcaccaatatcgctgggtaaagagaacaagttccttatccctcgttttggtttcgttgcagacccaaatccaactgaagtgggcactgctcccccggtccgatcctctaatcgacttgaatttgtaaagcagttcggtgtcaaagatgacagtgaagagttctcaaattcagatgggacagcaactgcgcaagtacttacttcttcttggagtcggacggagatgggagcgcttgaaacaggtcctaacaagaatggattttggtattgccaaacatgcggattcggcactcccaatggcgccgaaatccctaaaagccatcgaaaccccagaactaagcagcagtgtggcacctactacttagaaccccactctttgggtcacacctaccaaactgacatcgcgacagttgccgttccttcttatacaaatcttgacttcgaagggtggcgctctggaatgtacgccatcatcgaggcagctgctgaatgtttagaaatcaatcgtgatgatctaaacggcaccatggcgaaacacgacaacaggccaacgatggtgttgttcgatactgttcctggtggagctggtattacccgaaaagttcgagaaaacttccctcaagtactcgaagcggcaattagaagggtcgaaacctgttcttgtggcatcgatacttcgtgttatgcctgtttgcgatcattttctaaccagcgtttccatctcgatttaaggcgcgatattgcattggacttgcttcaccatatggcggttgcgatgccaaaatctgagtagataacaccagctacccacagctaaaag

SEQ ID NO: 62 - protein, 1600 aa, Corynebacterium glutamicum
MSNAPKKSFSDFFSPLATETETTITLSAIEVEKVNAKTEVTRNIDPVEAAEQISRDYRRYLKTLISPSNKTIAAEFNREIDESENLVYGPILQLTPPYAPGKSPAQLIDEGVLSPNFSRLDAALPKDRPLYQHQEDALRKIASGRNLIVSTGTGSGKTESFLIPIFDQLLRQQQAGELNPGVRALLLYPMNALANDQEKRLRELLADTPEITFGRYTGDTKQTREEAEKYFKLINGRNATPLPNELISRDEMQENPPHILLTNYAMLEYLLLRPADNAFFDDAYSNNWKFLVLDEAHVYAGAQGTEVGMLMRRLKDRVQRGNPLQCIATSASLEGTKEAIMTFGQDLFGEPFEFVNEDPSRQDLVSAHRRKLPKTFTWSLPDELFDQPLESDGLFQALQERGGDQYEELSKEEHIVKLRELSQQSSTRVEDIGKGLWPNVTDKASMHRTHMLVNLGSGVLSHDGVPALSARYHMFVRAVEGAFLGYTEQGKPIVSLDRQVTLGDTARPMYEMGACIKCGTVHISAHNDSGFLVPPENSSNFDEQQLKWVVLTDDFETADIDEDDLETDADENVKVLELQKLCTACGKLNGKNSLLCSGCSSHHDQFIDVKILEPRNGSQLTCTRCGGREKNLIRRLRTDSNAAPSVLTTSLFQLLPESADQDTSRKIGAGRKLLTFSDSRQAAAYAAPYLQASYTRLLERRILIETLRDEEFTEGASIERWISRASEVAKNNRVLANNLNPRETLEQTGNWVFADLASTVRRSSTEGLGLAKIELTPEALSQLSFRKPLGEMFGDPDAADAFFNLFAQEFRHKGAINCPDYVNLEDERFGPRRGQHFFTKDGGRKSTRRLYSWIPQRGTNNRKDFITKVLNRIGQAGDEGENITTLLHHLWNDYTNSEILKVPGEKAEGYTLNYNSLQVSPGKQHSWYECDTCRNTTPFNVLGLCPHGFCKGKLKEIDTSLPEYANNHYRKLATSLEILPLSAKEHTAQWTPTEAAEVQKEFIEGKINVLSCSTTFELGVDVGDLQSVMMRNVPPRTANYVQRAGRAGRRSGSAAFVLTFAKRSSHDLAVFKNPTQMIDGEMTVPFLHINNARIARRHTYSIALAAFFREQAAQNRFWKKAGEFFLGTDAAPYLRPAVAEQEATEILEEFLSPVPNYITEALRRVFPESLHEDLDIENQGWVKQFLEIFDTTRQEISEDFQTLKKMQGRALGSEQGKKADAFKRTITTLMDQDLLGYLAKKNMLPKYSFPVDTVDLQTNFSEAGNKVSLSRDLQLAITDYAPGAELVAGGKLWKSAGIRHLAGKKVETFYWTTCTECKHTETSRFGFTSEDVCSQCSAPISLGKENKFLIPRFGFVADPNPTEVGTAPPVRSSNRLEFVKQFGVKDDSEEFSNSDGTATAQVLTSSWSRTEMGALETGPNKNGFWYCQTCGFGTPNGAEIPKSHRNPRTKQQCGTYYLEPHSLGHTYQTDIATVAVPSYTNLDFEGWRSGMYAIIEAAAECLEINRDDLNGTMAKHDNRPTMVLFDTVPGGAGITRKVRENFPQVLEAAIRRVETCSCGIDTSCYACLRSFSNQRFHLDLRRDIALDLLHHMAVAMPKSE

SEQ ID NO: 63 - DNA, 697 bp, Corynebacterium glutamicum
  CDS (101)..(667): RXA02533
gttttgtgcaatccaatgctactcccacagagcgggctactttctctaaaaatgttctcatagtagataaaattgttcttaaagcgacattattgtctgcatggaagacgatctcagtgctgctctcgtcaaagcgcttttcgacgcgcgaacccaacgcaggctctctatctcggcgttagctgaatcctccggtgtgtcgcgagcaatgatttcccgcgtggaaaacgcagaggcgcaaccaagcgctgcattacttggacgcctttccggtgcattgggtatgacgctttcggagctcattgcacaggctgaaggtggctatgaccggggcgctcggcggtcaaagcagtctgtatggacagatccagctaccggttacacacggcgtgcagtgtcacagccgtcagaatccccactagaactagtggaagtaatgctgcctcctggggcggaagttggctacccagctgatgcttatcgtttcatggatcaggtggtctgggtactcgaaggggccgttcgtattactgaaggtgaagaggtccacgaactttcaacgggggattgtctacggtttgggcctccgcgagataccgactttgctaatcccaccaccgtagccactaggtatttagttgccttggacaagcgtgtacctcgtgcttgatataacaagtaaggaagcctgatgaat

SEQ ID NO: 64 - protein, 189 aa, Corynebacterium glutamicum
MEDDLSAALVKALFDARTQRRLSISALAESSGVSRAMISRVENAEAQPSAALLGRLSGALGMTLSELIAQAEGGYDRGARRSKQSVWTDPATGYTRRAVSQPSESPLELVEVMLPPGAEVGYPADAYRFMDQVVWVLEGAVRITEGEEVHELSTGDCLRFGPPRDTDFANPTTVATRYLVALDKRVPRA

SEQ ID NO: 65 - DNA, 3712 bp, Corynebacterium glutamicum
  CDS (101)..(3682): RXA02657
tatgcgagtacgccgaaaatcatagctgttaccttatacctaggttagaaaagccgagatcaatgcgttaatgaaataggagtttcacgggtgtaaggagatggctagactgtcccacatggccaagcaatcctcatttgtacatcttcacaaccacaccgagttttccatgcttgatggaatggccaagatcgatatgttggccgatgaggttaaagcccagggaatgcctgcggtcggaatcaccgaccacggcaatatgtatggctccaaccccttttatcgcaagatgacagagatgggcattaagcccatcattggcattgaaacgtatatggcacctgagtctcgttttaagaaagagcgtgtgcgttggggcgaaccacaccaaaaatcagatgatgtttctggttccggtgcgtatttgcaccagacgatgcttgcagaaaacaccacaggtttaagaaacctcttttatctatcttcgatggcatcgtacgaaggccagctaggcaagtggccccgcatggacgccgatatcatcgctgagcacgccgaaggcatcatcgccaccacgggttgcccttccggcgatgtgcaaacacgcctgcgcttgggccagttcgacgaagcccttgaagcagccgccatgtggcaggacatctatggtcgcgacaactacttcctcgagttgatggaccacgggctcgacattgaaacccgtgtgcgcagtgagctgctcgaaatcggacgcaagctcaatttgccacccctggtcaccaacgactgccactatgtgctggaatctcaggcgcaagcccacgaggcaatgctctgcgtgcaaacaggcaagacgcttcatgatgaagaccgattcaaattcggcggaaccggctattacgttaaatctgcagaacaaatgcgtgcactctgggacgacatggttccagatggctgcgacaacaccctgtggatcgctgaacgtgtgcagtcctatgacgaaatctgggaagaacactcacacgaccgcatgcctatcgctgatgttccagaaggctacaccccaaccacttggttgcaccatgaagtgatggctggcttggaggatcgtttctctggacagcaagttcctgaggattatattgagcgcgcggagtatgagatctccgttattgatatgaagggctacccttcctacttcctcatcgttgctgaaattatcaagcacgctcgttccattggcatccgtgtaggacctggccgtggttcggctgcaggtgcattggttgcctacgcgttgaccatcaccaacattgaccccatggaacacggattgctgttcgagagattcctcaacccagaacgaccatccgcacccgatatcgatattgacttcgatgatcgccgccgcggtgaaatgatccgttacgcagctgaccgttggggcgaggacaagattgctcaggtgatcaccttcggtacggtgaaaacaaagcaggcactgaaagactccgcccgtgtgcaaatggggcagccaggctatcaaatcgctgaccgcgtgatcaaggagcttccacctgccattatggcgaaggatattccgttgtccggtatcaccgatccggatcaccctcgttttaatgaagcaggtgcggtgcgccagctgatcgaaaccgaccctgatgtgaagcgcatttacgacaccgctcgtggtttggaaggcgtggtgcgccaatctggcgtgcacgcgtgtgccgtgattatgtcttctgtaccgctgctggactgcattccgatgtggaagcggccagccgacggcgcactgattacaggctgggattacccagcatgtgaggccattggcctgttgaagatggacttcctgggacttcgaaaccttaccgttattggcgatgcgattgaaaacattaaggccaaccgcgatggggaagtgcttgatctagaaaacctagcgatcgaggatgaagaaacctacaagctgctaggccgtggagaaacccttggtgtgttccagcttgatggtggtggcatgcaggagctgctgaagcgtatgcagccaaccggcttcaatgacatcgtcgcagcgcttgcgctgtatcgcccaggccccatgggtgtgaacgcgcactgggattacgccgaccgtaaaaacggacgcaagcccattactccaattcacccagagttggaggaagctctggaagaaatccttggtgaaacctatggtctgattgtgtaccaggagcagatcatgaggatctcccagaaggtcgcaaactacaccgctggtcaagcagatggtttccgtaaagccatgggtaagaagaagcccgaggtcctggaaaaggagttcgcaaacttcgaaggtggaatgaaggcgaacggctattcagatgccgcgattaagactttgtgggataccattctgccgttcgccggctacgcgttcaacaagtctcacgccgcaggttatggacttgtatccttctggactgcctatttgaaggcgcactacgcgccggaatacatggcagcactgctgacttctgtgggtgataacaaggacaaatcggcgatctacctttctgattgccgacaccttggaattcgagtgctttcgccggatattaacgagtcctcgttgaacttccttcctgttggcaccgatattcgctatggcctgggagccattagaaacgtgggtgctgaagttgtggattccattttggatacccgcaaggaaaagggcctatttaaggacttctcagactacttggacaagatcgataccctgccgtgtaacaagcgcatcaccgagtctttgatcaagggtggcgcttttgactcccttggacacgcacgaaaaggcctcatgctggtcttcgaagatgccgttgattccgtcatcgctaccaaaaaagctgctgacaagggacaatttgatctctttgcagctttcgactcggataacaacgacgatgtggcaagtttcttccagatcaccgttcctgatgacgaatgggaccgtaagcatgagctcgcactcgagcgagaaatgctgggtctgtatgtttctggacacccactcgatggctatgaagatgccattgctgcccaggttgatacagcactgaccaccattgttgccggtgaactcaagcacggcgcagaagtgaccgtgggtggcattatctctggtgtggatcgacggttctccaagaaggacggttccccttgggcgattgtcaccattgaagatcacaacggcgcgtccgttgaattgttggtcttcaacaaggtgtattccatcgttggatccatgattgtggaagacaacatcatcttggccaaggcacacatctccattcgagatgatcgtatgagccttttctgtgatgatctccgcgttccagagcttgggccaggaaacgggcaaggacttccgcttcgtttgtccatgcgtactgatcagtgcaccatgtccaacattgccaagctcaagcaggtgctggtggacaacaagggtgaatctgatgtgtacctcaatttgatcgatggggataactccacggtcatgattttgggtgatcacttaagagtcaaccgatccgcaagtttgatgggcgacctcaaggcaacgatggggccaggcatcctcggttaatcacatcacactgggattaccccgtgt

SEQ ID NO: 66 - protein, 1194 aa, Corynebacterium glutamicum
MARLSHMAKQSSFVHLHNHTEFSMLDGMAKIDMLADEVKAQGMPAVGITDHGNMYGSNPFYRKMTEMGIKPIIGIETYMAPESRFKKERVRWGEPHQKSDDVSGSGAYLHQTMLAENTTGLRNLFYLSSMASYEGQLGKWPRMDADIIAEHAEGIIATTGCPSGDVQTRLRLGQFDEALEAAAMWQDIYGRDNYFLELMDHGLDIETRVRSELLEIGRKLNLPPLVTNDCHYVLESQAQAHEAMLCVQTGKTLHDEDRFKFGGTGYYVKSAEQMRALWDDMVPDGCDNTLWIAERVQSYDEIWEEHSHDRMPIADVPEGYTPTTWLHHEVMAGLEDRFSGQQVPEDYIERAEYEISVIDMKGYPSYFLIVAEIIKHARSIGIRVGPGRGSAAGALVAYALTITNIDPMEHGLLFERFLNPERPSAPDIDIDFDDRRRGEMIRYAADRWGEDKIAQVITFGTVKTKQALKDSARVQMGQPGYQIADRVIKELPPAIMAKDIPLSGITDPDHPRFNEAGAVRQLIETDPDVKRIYDTARGLEGVVRQSGVHACAVIMSSVPLLDCIPMWKRPADGALITGWDYPACEAIGLLKMDFLGLRNLTVIGDAIENIKANRDGEVLDLENLAIEDEETYKLLGRGETLGVFQLDGGGMQELLKRMQPTGFNDIVAALALYRPGPMGVNAHWDYADRKNGRKPITPIHPELEEALEEILGETYGLIVYQEQIMRISQKVANYTAGQADGFRKAMGKKKPEVLEKEFANFEGGMKANGYSDAAIKTLWDTILPFAGYAFNKSHAAGYGLVSFWTAYLKAHYAPEYMAALLTSVGDNKDKSAIYLSDCRHLGIRVLSPDINESSLNFLPVGTDIRYGLGAIRNVGAEVVDSILDTRKEKGLFKDFSDYLDKIDTLPCNKRITESLIKGGAFDSLGHARKGLMLVFEDAVDSVIATKKAADKGQFDLFAAFDSDNNDDVASFFQITVPDDEWDRKHELALEREMLGLYVSGHPLDGYEDAIAAQVDTALTTIVAGELKHGAEVTVGGIISGVDRRFSKKDGSPWAIVTIEDHNGASVELLVFNKVYSIVGSMIVEDNIILAKAHISIRDDRMSLFCDDLRVPELGPGNGQGLPLRLSMRTDQCTMSNIAKLKQVLVDNKGESDVYLNLIDGDNSTVMILGDHLRVNRSASLMGDLKATMGPGILG

SEQ ID NO: 67 - DNA, 4036 bp, Corynebacterium glutamicum
  CDS (101)..(4006): RXA03166
ccctccctatagtgattagttcacctccagactacctggcaccgcgtgggctgctttcacttggactttcggcaaagacaagtagaattagcccctagtcatgactacttctgaaactgccccatcaaaggcttccctgtatgaacttttagagggcgtatccctctccgacgagcgcacgtttaggcgccgactgtccaaagcccgcgcgcccaaggcgcttggtgcgattaaggctgatatcgataaggcacgcttgcttatcgacgaaaagagccagttaattccgtctatcacctacccagaaaaccttccggtgagttcccggcgcgatgatatcgccgaggctatccgtgataatcaggtggttattatcgccggtgagactggttcgggtaagacgactcagattcctaagatttgtttggacctaggccgtggccggcgtgggctcattggccacacacagccacgtcgattagcagctaggaccgtcgccgagcgcatcgccgatgaattggggcaagacatcggcgaatcggtgggttatgcgattcgttttgatgatcgagtttcctcgcatacatccgtgaagttgatgacggatggtattttgcttgctgaaatgcagcgggatcgtttcctcaatgcgtatgacaccatcatcatcgatgaggcgcatgaacgttccctcaacattgacttcattctgggttatttgcgccagttgttgcctaagcgccctgatcttaaagtcattattacctccgcaacgattgaccctgagcgtttcgcggagcactttgctgatgcttctggaaaaccagcaccaattatcgaggtctccggccgcaccttcccggtagagatccgttatcgcccacttgaggtattagacggcgataaaattatcgataccgatccccttgacggcttgtgttctgctttggaagagctcatggctgaaggcgacggcgatatcctctgcttctttgccggtgagcgtgatatccgcgatgccatggaggcaatcgaggcccgacgctggaaaggtgtggaagtcactcccctgtttggccgcctgtccaaccaggagcagcaccgtgtatttagcccgcactctggtcgacgcattgtgctttccaccaatatcgcagagacatccctgacggttccgggcattcactacgtggttgataccggtacggcgcgtatctctcgttattcagtgcgcaccaaggtgcagcgccttccgattgagaacatttcccaggccagcgcaaaccagcgttctggtcgttgtggtcgtgtcgcagacggtattgcgattcgtttgtattccgaagatgatttcaactctcgcccagagttcaccgatccggaaattctgcgcaccaacttggcgagcgttattttgcgcatggcgtcgctgcgtcttggcgatattaatgatttccccttcgtccaagccccagagcaacgctccatcagggatggtattttgctgctccacgagttgggcgcactcaccgacgacacccaagccgatggttcaccgcagctcacccagatcggtaaagacttagccaacatcccagtcgatccccgcatggcccgcatgctcgtagaagccaacactctaggctgcctgcattctgtcatggtcattgtgtccgctctgacgattcaagatgttcgcgaacgccccctggaattccaagcccaagctgatcaagcccacgctaggttcaaggacaccacctcagatttcttaggctttttgaaactgtgggagtacatcgccgatcagcgcaatcaaagcagcggcaattccttccgcaagcagatgaaaaaagaattcctccactacatgcgtatccgcgagtggtgggatttggtgcgccaattagagcagattggccagcaacttggttgggcaaagaaggagcaggttgcaggcaccgccagccctgacatcattcaccaatccttgctcaccggtctgctctcgcaaatcggttcccgtgatggtgagagcaaagaattcactggagccagaggtaccaaattcttggtctttcctggttctgcgctaaccaagaagccgccacagttcatcatggctggccaattggtagaaacctcacgtttgtgggctcgcgatgtagccaagattgaaccagagtgggtggaaaaagcagccggcccattgctcaagcaccaatactctgaaccgtattggtcctcaaagcgtggcgctgccatggtgcaccgcaaatcaacgctctacggtgtgacaattgttgccgacaaggtagttccctaccacacggttgatcccgtggctgcgcgcgatatgttcatccgccatgccctcatcgaaggcgattggtccactcaccaccgcttctaccacgacaacgtggccaaattggaggcaatcggagaacttgaagccaaggcgcgtcgccgcgacatcgtcgtagatgaagacaccctgtttgatttctacgatgccaagcttccaagcaacgccaccaccacccgcaatttcgattcctggtggaagaaaacatcacgcgtcacaccagatcttctcgatttcgacccagatagtctgatcaacgaagacgctgacggcgttaacgaagaagccttccccgacaagtggattaaaggcagcctgatcttcgatctcagctaccacttcgaacccggccaccgcgatgacggcgtcacagtcctcatccccattccagtgctgggtggacttgataccgaaggcttcgattggctagttccaggcttaaggcttgatttggtgaccgagttaatccgcaccatgcctaaggctttacgacgcaccgttgtccctgccccggatttcgccgagcgggtcttgccgttactgcgtccctacatgacaccactgaccacccaacttgccgatgcactccataccctgggcggccaaggaatcaacgcctctgatttcgatcctgccaaactccccgatcacctgcgcatttcctatgcagcagtagatcgtcgtggcaagatcatcgaccgcgaccgtgacctcgaagcactaaagaaacgccgcgcgaaccaaatcagggcatctgtttctagcgttgctaaggcatccgaacaagatgaaactacgcagtggaccacagataccttgggcaccatcgatgaagaaatcgagaccactgtcgatggacagtccgtcaccgcgtaccccgccttggttgtcaccccgactggcgtatccgtcaaggtcatgcccaccaaggctgctgctgatgcctcgatgatcaccgcaacattgacactgttgatgcgtgagattgaagtatccacaaagcaaatggtcaagggactacccttgcaacaacgagtcgcagtggacaactatccccacggcggtgccgaaggactggtttctgatgcccgtatcgccgcaattcgcgatttgatgtttgaacacggcggagctgtgcgttcaccggaagagttcgacgttcttctagccaaggtgaagccggaaacaccaggagttgttcgtcgaactgtcgttgagctagccccagcattggttcactatgcatccgttgtgtcagagctggagtcctggtctggacctgccattgacgatatgaccgcccagttggatttcctcttgccaaagcaggccatcagcattcacggcatcagtaggttgaggcaccttccgaggtatctgcaggcgttgacgattcgcctagaagagatgaaccaaaatccggatcgtgacgccgaccgtcaagatgaagtgaacttcgttgaagagcagctggagaaacagctcagtaagctacccgctgcgcgagccaacaccaaggaagccaaggatattgcctggcagattcaggaactaaggatcagcctctttgcacagcggttaggcactccccgacctgtatcggcgcagagaatccagaaggctattgccaagcttcgataagcactgcttgagatgagggactagtta

SEQ ID NO: 68 - protein, 1302 aa, Corynebacterium glutamicum
MTTSETAPSKASLYELLEGVSLSDERTFRRRLSKARAPKALGAIKADIDKARLLIDEKSQLIPSITYPENLPVSSRRDDIAEAIRDNQVVIIAGETGSGKTTQIPKICLDLGRGRRGLIGHTQPRRLAARTVAERIADELGQDIGESVGYAIRFDDRVSSHTSVKLMTDGILLAEMQRDRFLNAYDTIIIDEAHERSLNIDFILGYLRQLLPKRPDLKVIITSATIDPERFAEHFADASGKPAPIIEVSGRTFPVEIRYRPLEVLDGDKIIDTDPLDGLCSALEELMAEGDGDILCFFAGERDIRDAMEAIEARRWKGVEVTPLFGRLSNQEQHRVFSPHSGRRIVLSTNIAETSLTVPGIHYVVDTGTARISRYSVRTKVQRLPIENISQASANQRSGRCGRVADGIAIRLYSEDDFNSRPEFTDPEILRTNLASVILRMASLRLGDINDFPFVQAPEQRSIRDGILLLHELGALTDDTQADGSPQLTQIGKDLANIPVDPRMARMLVEANTLGCLHSVMVIVSALTIQDVRERPLEFQAQADQAHARFKDTTSDFLGFLKLWEYIADQRNQSSGNSFRKQMKKEFLHYMRIREWWDLVRQLEQIGQQLGWAKKEQVAGTASPDIIHQSLLTGLLSQIGSRDGESKEFTGARGTKFLVFPGSALTKKPPQFIMAGQLVETSRLWARDVAKIEPEWVEKAAGPLLKHQYSEPYWSSKRGAAMVHRKSTLYGVTIVADKVVPYHTVDPVAARDMFIRHALIEGDWSTHHRFYHDNVAKLEAIGELEAKARRRDIVVDEDTLFDFYDAKLPSNATTTRNFDSWWKKTSRVTPDLLDFDPDSLINEDADGVNEEAFPDKWIKGSLIFDLSYHFEPGHRDDGVTVLIPIPVLGGLDTEGFDWLVPGLRLDLVTELIRTMPKALRRTVVPAPDFAERVLPLLRPYMTPLTTQLADALHTLGGQGINASDFDPAKLPDHLRISYAAVDRRGKIIDRDRDLEALKKRRANQIRASVSSVAKASEQDETTQWTTDTLGTIDEEIETTVDGQSVTAYPALVVTPTGVSVKVMPTKAAADASMITATLTLLMREIEVSTKQMVKGLPLQQRVAVDNYPHGGAEGLVSDARIAAIRDLMFEHGGAVRSPEEFDVLLAKVKPETPGVVRRTVVELAPALVHYASVVSELESWSGPAIDDMTAQLDFLLPKQAISIHGISRLRHLPRYLQALTIRLEEMNQNPDRDADRQDEVNFVEEQLEKQLSKLPAARANTKEAKDIAWQIQELRISLFAQRLGTPRPVSAQRIQKAIAKLR

SEQ ID NO: 69 - DNA, 1312 bp, Corynebacterium glutamicum
  CDS (101)..(1282): RXA03266
gaaccttcttccaagaagttttccctatcggtaaacgtccgggtttagttaaacgatgaactatatttgatctatatttcccaaggagctttaaaacagcatggagtcacaaaacgtgtccttccgtgtggccagggaagacctggttaccgcggtagcctgggtcgctcgcaacctgcccaccaaaccgactcagccggtacttcgagccatgctgatcactgccgatgatgagggtcttgaactcgccggttacgactacgacgtatccacccgagttcgcctctcagctgaggtttctcagccaggtcgcatcgcagtagccggcaagctgctgtctgaaatcacaggatctttgcccaacaagcccgttgatttccgcatcgacggatccaaagcttttgtcacttgtggttcttcccgcttcgagctgccactgatcccgcttgatgattacccaatgctgcccaagcttcctgcaggtaccggttccatcaacgccaagctgttcaccgaagcagtctcccaggtggcatccgctgcaggtaaagatgattctttgccgatgctcaccggtgtcagcatggaaatcgtgggcaaccagatcaacttggctgctactgaccgtttccgcctggcgctgcgcaccttcgaatgggaagcaaacgacccagagctcaacgttaaactgctgattcctgcccgcaccctgctggacaacgcgcgttctttggattccggtctcaacgattccatcgacatcgctgtcggtaccggcgatcaggttggccgcgaaggactattcggcgttcacaccgataaccgcgaaaccaccaccaggcttctcgacgccgatttccccaacatcgcaccactgcttcccaaagagcacaccgcgatcgcatcagttgaaatcgcaccgctggtcgacgccatccgccgcgtatccctggtggcagaacgcaacgctcagatcgtcttgcacttcagcgaaggccaggtcatcttgactgcaggcgcaaccgaggcaggccacgcggaagaaaccctgccgtgtgcattcaccggcaaggaactgaccatcgcgttcaaccctggctacctgaaggatggactttctgtagttccaacttctcgagcagtcttcggattcactgagccttcccgcccagcgatcatgatcccagagcctgaagaaatgccttccgccaacgaaaatggcattttccaaactccggacacctatttcacctacctgctcatgccagtgcgcctgccaggctaaacacaaaagtttcacccttttcgcgcc

SEQ ID NO: 70 - protein, 394 aa, Corynebacterium glutamicum
MESQNVSFRVAREDLVTAVAWVARNLPTKPTQPVLRAMLITADDEGLELAGYDYDVSTRVRLSAEVSQPGRIAVAGKLLSEITGSLPNKPVDFRIDGSKAFVTCGSSRFELPLIPLDDYPMLPKLPAGTGSINAKLFTEAVSQVASAAGKDDSLPMLTGVSMEIVGNQINLAATDRFRLALRTFEWEANDPELNVKLLIPARTLLDNARSLDSGLNDSIDIAVGTGDQVGREGLFGVHTDNRETTTRLLDADFPNIAPLLPKEHTAIASVEIAPLVDAIRRVSLVAERNAQIVLHFSEGQVILTAGATEAGHAEETLPCAFTGKELTIAFNPGYLKDGLSVVPTSRAVFGFTEPSRPAIMIPEPEEMPSANENGIFQTPDTYFTYLLMPVRLPG

SEQ ID NO: 71 - DNA, 331 bp, Corynebacterium glutamicum
  CDS (101)..(301): RXA03332
attctccttgcagcctataagcgttaggctttacctacacacccggaacacccttacaccagcgcgagctacagaagattcacagattgggagcccttcgatgagattctatgtgaccaatagggacaccgatcctcccatgggatcgaggggaacctgggttaatctactccgggacaattgggatgactatgggttcaaaacttcttttcatgtaaaactatatcgggacaatggcgagacaatacagctcggaatggtgaagatcctgcgtgccggacaaattgagtttttactgacctaggggaccgactgaggaagtcgcacagtg

SEQ ID NO: 72 - protein, 67 aa, Corynebacterium glutamicum
MRFYVTNRDTDPPMGSRGTWVNLLRDNWDDYGFKTSFHVKLYRDNGETIQLGMVKILRAGQIEFLLT

SEQ ID NO: 73 - DNA, 1105 bp, Corynebacterium glutamicum
  CDS (101)..(1075): RXA03341
taatgacgatggaggtgtcaagcagaatcatgaagtagcccaaaaggacgatgcttaaaatcatgtgactaatttttgatggcagcaagaaaacgcaacagtgatcgcttatgccggtactactggtacctgtttaaaagtcagccccaacgcctatgttgaagatatggatgtacacgcagatactcgagaattcctcactgcgcgccgcaatcgtctcactccaaaagacgccggattgcctatttaccaaggcaaaaggcgagttccggggcttcgacgtgaagaagtggccatgttggctggcgtgagcgtggactattacacacgtcttgaacgaggcaacttgagtggtgtgtcagaacaggtgttaagcgcgttagctactgccttacagctggatgatgcggagacgcagcatctgtttgatctggccaagctcagtaattcaccggcgtcacggcgtaagcgtacccctgcaccgaagtctgtgctgcgccctgaggtgctgcgaattctcaattcgatgcacgatattccagcatatattcgttctgaaagccgtgaccttctggcagccaacacttttggtcgtgcgctatatgcaccgttgtatgaaagcacggtctccgatggaattagtggggaaccggggtcaatcaatgttgcacgctttacattcctcgatccagcagcgcgcgaatttttccctgagtgggagagaacttcggcagatttggtagccagcttgcgcaccgttgcagcacagcggcccaacgacacgttgtttagcaatttgatcggtgagctggtgaccaagtcagaagtcttcgcgcaaatgtgggccgaccataatgtccgcatgcatcgaacaggttccaagaagatcgtgcacccgttggtgggggagatggagctggattttgaaacgcttgatcttccagcagatcccgatattgccctcgtggtgtactccgctgcggaaggttcgacatctgcaatgaaccttcaacttctggccaattggacaggtaatgacagcccctccctcagcacagaacttggtgacactatttaattatgactttcacactgaacaacggac

SEQ ID NO: 74 - protein, 325 aa, Corynebacterium glutamicum
VIAYAGTTGTCLKVSPNAYVEDMDVHADTREFLTARRNRLTPKDAGLPIYQGKRRVPGLRREEVAMLAGVSVDYYTRLERGNLSGVSEQVLSALATALQLDDAETQHLFDLAKLSNSPASRRKRTPAPKSVLRPEVLRILNSMHDIPAYIRSESRDLLAANTFGRALYAPLYESTVSDGISGEPGSINVARFTFLDPAAREFFPEWERTSADLVASLRTVAAQRPNDTLFSNLIGELVTKSEVFAQMWADHNVRMHRTGSKKIVHPLVGEMELDFETLDLPADPDIALVVYSAAEGSTSAMNLQLLANWTGNDSPSLSTELGDTI

SEQ ID NO: 75 - DNA, 1903 bp, Corynebacterium glutamicum
  CDS (101)..(1873): RXA03590
aaaagcaactcacttcgtgcttttttcaccgaccccggctgtgtggatgccacccacttacaccgcacaatcgaaaataaaagtaaaggatgttcaccttatgtctgacaccacagacagccacgacccagcaacctcccctacagtcgattcagccgcatccggtacttctgaccccaaccagcaacccaagaagaaattcaccatcattaagcaggtgaacatgattgcgcgtactgccattgatgactgcattaatcgactaggcccagatgttgtcaccatgtccagcgaagacattgctgatcaagtggtcaactccattaacgttgctattgccagagaaaacacacgtgcccaagatgccaatgctgcggtgcgttacacacctatctttaagctcgatttctcccatgtcgctgtccttatgcgcagactgcatgtgattatcaacatcgcgccatcgcataactctgatcctgacagcgatatgttggctatttacgaccccaacccacgcagcgagcattacgggatctatcgcacctcagaggctgaaatacgccgcgtagcccgtgaatactgccctgacctcacctcagcgcagtttagagaactgcagatggcactctcagatgctgcacctcgtaaagtccgccacaagcagcgtgacttgattcccgtgaaaaacggcatctttaattactcgactaaacaactagaaccgttttctcaagagtttgtctttcttgctaaatctgcagtgaactacaacccaaatgcacaaaaccctgtcatcactcatccccaggatggctctgtctgggatgttgaatcatggatgaacgatctctccgatgaccctgaagtcgttaacctgctgtgggagattatcggcgctatcgtgcgcccctatgtgtcctggaacaagtctgcctggttctactcagaggccggcaacaacggtaaaggcacgctcgttgagctcatgcgcaacatcttgggcgcagaggcctataccagtatccagctctcggacttctctaaagagttccaccttgaatcactgactcgtgcacaagcaatccttgttgatgagaacgatgtcggcgccttcttagaaaagtcagcaaaccttaaagcgattgtcaccaatgacgtcatctccattaaccgcaagcacaaaaccatgctcagctatcagttttatggctttatggtgcagtgtattaacggcttccccaaggtcaaagaccagtcggagtcatttttcaggcgccaactctttgtgccgtttgagaaaagcttcaccggtgccgagcgcaagtacatcaaagacgactacatgtcgcgcactgatgtcctcgaatatgtactgcaccgcgtactgcatatgaactacgacaatctctccacccctgctgcagctctcgctgtgctggatgaatacaaagagtttgtcgatcctgtgcgcgcattctggaatgaattcagcgatcaatttgtctgggatcttcttcccctgcaattcctctacgagttttatcgcaagtggtttgaccgtgacagcccatccgggtctgtgctcggcaaacgcagcttcattcaaaaaatcaccaccatcgccgttgatagcggtcagtgggagtatccgctgacagcacagcgtcccggtggcgatatggccgttcctgagccattagtcattgattatgacctcaccgagtggcaaaacgccactgtacctaaaggtcacgtcaacaaggggctccctctaccactcaaggctaattatcgaggactgctccgcaaacctctaacaacacctgctactccccctgcagcgccgctcaaccccacaccacccaccccttaacaaccacaagaaagatttatcatgtcc

SEQ ID NO: 76 - protein, 591 aa, Corynebacterium glutamicum
MSDTTDSHDPATSPTVDSAASGTSDPNQQPKKKFTIIKQVNMIARTAIDDCINRLGPDVVTMSSEDIADQVVNSINVAIARENTRAQDANAAVRYTPIFKLDFSHVAVLMRRLHVIINIAPSHNSDPDSDMLAIYDPNPRSEHYGIYRTSEAEIRRVAREYCPDLTSAQFRELQMALSDAAPRKVRHKQRDLIPVKNGIFNYSTKQLEPFSQEFVFLAKSAVNYNPNAQNPVITHPQDGSVWDVESWMNDLSDDPEVVNLLWEIIGAIVRPYVSWNKSAWFYSEAGNNGKGTLVELMRNILGAEAYTSIQLSDFSKEFHLESLTRAQAILVDENDVGAFLEKSANLKAIVTNDVISINRKHKTMLSYQFYGFMVQCINGFPKVKDQSESFFRRQLFVPFEKSFTGAERKYIKDDYMSRTDVLEYVLHRVLHMNYDNLSTPAAALAVLDEYKEFVDPVRAFWNEFSDQFVWDLLPLQFLYEFYRKWFDRDSPSGSVLGKRSFIQKITTIAVDSGQWEYPLTAQRPGGDMAVPEPLVIDYDLTEWQNATVPKGHVNKGLPLPLKANYRGLLRKPLTTPATPPAAPLNPTPPTP

SEQ ID NO: 77 - DNA, 994 bp, Corynebacterium glutamicum
  CDS (101)..(964): RXA03607
gggtaagaacttacaggatctcataggtcaggtgtttgggcgatggactgtcatagatcgagcggaaagtagggtttcctccacaggaaggaaaaccaccatgtggcattgcagatgtacttgcggtgttgagaaagatcttgctgcggggtcactgaagaatggtgattcgaaatcgtgtggttgtctaaaaatcgagtcgctttcaaagaatagggatttagttggttccacatttggtcgatggtctgttgttcgacgtggtgaggacgtgctgcagtggggtcgcttatctaaggcgtggttttgcgagtgcgagtgtggagcgacaagggacgtattggaacagtctttgttgcggggtcggtcaatatcgtgcgggtgctatcgcatagaacagcgacgagaaactgctgtttttgaagatttgactggcaaggtatttaaccagtggactgtgctgtctcgtacggatgacaggttttaccctggtggtgggcggtctcaaatgtggttgtgccgatgtatgtgcggctccgaaaatgctgttgctgggattatgttgaggcagggtattagccaatcgtgtggttgtttgcacggatcaatccaagagtcacatgtcagggactttcttttaaagaatgattttcagtttgaatctcaaaagactttcgatggtttggtgggggttggtggaggaccactgagttatgattttttggttttcaaggataccgagccctggttgttgattgagtgccaaggtgagcagcattttagaccagttgagtatttcggtggagagagtcgtttcgcgatccaacaagagcacgacagacgaaaacgagcgtttactgtagtccgagagctaacacttttggagatcccatatacggcgagaacagcagaatcaattggcgagttattagtaagtggtccgtttcaggaagaagtttttggatagcggttttgcgtagactgacgaagaata

SEQ ID NO: 78 - protein, 288 aa, Corynebacterium glutamicum
MWHCRCTCGVEKDLAAGSLKNGDSKSCGCLKIESLSKNRDLVGSTFGRWSVVRRGEDVLQWGRLSKAWFCECECGATRDVLEQSLLRGRSISCGCYRIEQRRETAVFEDLTGKVFNQWTVLSRTDDRFYPGGGRSQMWLCRCMCGSENAVAGIMLRQGISQSCGCLHGSIQESHVRDFLLKNDFQFESQKTFDGLVGVGGGPLSYDFLVFKDTEPWLLIECQGEQHFRPVEYFGGESRFAIQQEHDRRKRAFTVVRELTLLEIPYTARTAESIGELLVSGPFQEEVFG

SEQ ID NO: 79 - DNA, 2407 bp, Corynebacterium glutamicum
  CDS (101)..(2377): RXA03743
tgcgacccgcattgctgggtcggttgaataactcaaataactaattcaattagtttcttgaccgtgttaaagtattaaaaaagtaagaaaggttaatactttgacaattggaattttgacggagaaagcttcggctgcgaaaaactttgcgaaagccctcggtggaccctctggcacttataacggcgagaagtacgttattgctgcagccagcgggcacctttatgaatttgtcgagccagaagagatggtgccaccaagctatgccgataagatcggcggctactgggatctggctaagctgccgtgggatgagacgcagtttttgtggtcacgcgagcaaaagcacggtgcagctaacacgattgcacgcattaagaaaaccttgagcagctgcaccaccattgtgatcggatcagatattgatcccacgggcgaaggtgatctgttggcgtgggagattatcgctgagctggggttagacaccaagaagattcagcgtatggaatttgttgatgaggcgccggcctcgattcagcaggcgtttatcaaccgccgcgatgtgacctccatgcatgacgagcccaattatcttaaggcggaattccgatcacgctttgatttgctgtcgatgcagtggactcgcggtgccaccaaagtgctagagaccactggtcggcgtgcagtgttgcgcaatggtcgcctgaaatctgccatggttgcgattgtggggcagggcttagatgcgtacaacgattataaaaagattcctttttatcaaaaccgcttcattgatgatcacggtgtaagttacgtcaaccccgaggaaccgcgttataagacttgcgacgaggtaccacagctttataaggctagtgcggtcgaatgctatgagaagagcatgaaaaagaccgcgccaccacgtctacttgacctggcgagcctgtcggccctgctgtctaaagagggctttagcgcaaagaacgtgcttaagacttatcagcagatgtacgaggcgcaggtcgtgtcttatccgcgtaccgaggataagacgattacccctgagcagtttaaggaactagcgccgttggtcgataagatcgccggcctggttggtgtgaacccggctgaccttacgcaccgacagccacggtccacgcatgttaagcccaagggtgcacacggcgccaaccgtccgggtttgaatgtgccgaccagtattgcagcggtgaaaaccacctacggtgtgctcggacagcgcatttatgaagtgctcgctaagagctatctcacgatgctggcagaggattacctctatgagcaccaaaaaggccgcgtcgtggattacccagcgtttctcggtacagcaaatgtgccaaagtccttgggttggaaaggtattttcgacgtagacgctgaggctgatgatgatgctgccggcagtgatgcagcacagcaggggattggtactcgtgctgagccagaagtgtttgagggttttccgcagcgaccaccgcatccgtcaatgacgtggttgatgaaacagctcgataagcatgatgtcggtaccggtgcgacacgaacgagcacctatgccgaggtcacagccggcaagtcagcattgctcaaagaaacgcgtggcaaagtcactatgactgacgcagggcaactgaattatctgctgcttcctggcacccacattggcgacctcaaacttaccgagcgcgtttatgccgatatggcagcggttgctgctggtgaaaagactgcagagcaggcactggaaccagttaaacagtgggtcgaagaagatattgcgaccatgacccgtaacgcaaaaaacatcccccaagaactaggaaagaaactcatgactactacttttaccccttctgtcaagcactccggcacctggaacggtgagcaggtgagctttaagaaggtctactgcgggcatgaatttagcgatgcagaatgcgaggcgttgctgcgcggtgaggagctcaccattaccgatgccatgattggtggacagatcacgacagtcaccggcaagctggcgcatcaaagctttaacaaagacggcaagaccattaagttctttgggtttaaggggcaggttgatcgcattgcctctgcagacccagctgtgtacgcggtgggtgtgtggaaggttgagggtgaaaagattcgcttcaagcgcgtatggggtggtcacaagttcaccgacaaggagatcgccgatctgcttgagggccgcgagattgcttttgatgccatgtcgaaggccaagaagccgtacaccgctcggggatcgctgcagcgcggcgagtacaacggtaattcgttcgtcggcttccagctcgcaccacgcgattaacgcacaagtacgtgcactagaagaaac

SEQ ID NO: 80 - protein, 759 aa, Corynebacterium glutamicum
LTIGILTEKASAAKNFAKALGGPSGTYNGEKYVIAAASGHLYEFVEPEEMVPPSYADKIGGYWDLAKLPWDETQFLWSREQKHGAANTIARIKKTLSSCTTIVIGSDIDPTGEGDLLAWEIIAELGLDTKKIQRMEFVDEAPASIQQAFINRRDVTSMHDEPNYLKAEFRSRFDLLSMQWTRGATKVLETTGRRAVLRNGRLKSAMVAIVGQGLDAYNDYKKIPFYQNRFIDDHGVSYVNPEEPRYKTCDEVPQLYKASAVECYEKSMKKTAPPRLLDLASLSALLSKEGFSAKNVLKTYQQMYEAQVVSYPRTEDKTITPEQFKELAPLVDKIAGLVGVNPADLTHRQPRSTHVKPKGAHGANRPGLNVPTSIAAVKTTYGVLGQRIYEVLAKSYLTMLAEDYLYEHQKGRVVDYPAFLGTANVPKSLGWKGIFDVDAEADDDAAGSDAAQQGIGTRAEPEVFEGFPQRPPHPSMTWLMKQLDKHDVGTGATRTSTYAEVTAGKSALLKETRGKVTMTDAGQLNYLLLPGTHIGDLKLTERVYADMAAVAAGEKTAEQALEPVKQWVEEDIATMTRNAKNIPQELGKKLMTTTFTPSVKHSGTWNGEQVSFKKVYCGHEFSDAECEALLRGEELTITDAMIGGQITTVTGKLAHQSFNKDGKTIKFFGFKGQVDRIASADPAVYAVGVWKVEGEKIRFKRVWGGHKFTDKEIADLLEGREIAFDAMSKAKKPYTARGSLQRGEYNGNSFVGFQLAPRD

SEQ ID NO: 81 - DNA, 3118 bp, Corynebacterium glutamicum
  CDS (101)..(3088): RXA03903
catagtgggcacagacacgcaataagaacagtggctttctgaagtgttctaaaaggaacatgaagggggtcaaggcagttaacgagagggatgcattcccgtggcagataccgcaggcaccacaggatcgaaaaagaagtacttggtgatcgtcgagtcggcgaccaaggctaaaaagattcagccttaccttggcaacgactacatcgtcgaggcctccgttggtcatattcgtgatctgccacgtggcgctgctgacatccctgcaaagtacaagaaggagccttgggctcgtcttggtgtggacaccgatcgcggtttcgcgccgctttatgtggtgagccccgataaaaagaagaaggtcgctgacctcaaggcgaagctcaagctcgttgatgagttgctgctggcaacagaccccgaccgtgagggcgaggcgattgcgtggcatttgcttgaggtgttgaagccgactgttcctgtgcgtcgcatggtgttcaatgagatcacgaagcctgccattttggctgcggcggaaaacactcgtgagctggatgagaacctggtggatgcgcaggaaactcgtcgtattctggaccgtttgtacggctatgaagtctctcctgtgctgtggaaaaaggtcatgccgaggttgtcggcgggccgtgtgcagtcggtggcaacccgtgtgattgttgagcgggagcgcgagcgcatggcgttcgtgtcggcggattattgggatctgtcggcggagtttaatgcgcgtgaaaacggcaaggcggattcggataacccgtcgtcgtttactgcgcgtttgtccacgattgatggaaaccgtgttgctcaaggccgtgattttaatgatcggggagagctgacctcggaggctgtcgtcgtcgataagcagcgtgctgaggcgttagccgaggctttggaaggccaggaaatggccgtcgttggggtcgaggaaaagccgtacacccgtcgcccttatgcgccgtttatgacctctacgctgcagcaagagtctggccgcaagctgcattacacttctgagcgcacgatgcgtattgcgcagcgcttgtatgaaaacggccatatcacttatatgcgtactgactcgacctcgttgtcggagcagggcatgaaggctgcgcgcgatcaggcgttggagctgtacggtgcggaatatgtttcgccgagcccacgtacctatgaccgcaaggtgaagaactcccaggaggcccacgaggcgattcgcccagctggtgaaacttttgcgaccccgggccagctgcatggccagttggatgcggaagaatttaagctctatgagctgatttggcagcgcactgtggcctcccagatggccgatgccaagggcacgtccatgaaggtcaccatcggtggcaccgcgaagaccggcgagaagactgagttcaacgcgaccggccgcacgctgactttccctggcttcctgcgcgcttacgtggaaaccacccgcaccgccgatggccgcgacgtagctgacaacgccgaaaagcgtctgccactgctgtctgagggcgatctgctcaaggttttgagcatcgaagccgatggtcacagcaccaatccacctgcgcgctacacagaggcgtcgctggtgaagaagatggaagatctgggcatcggccgtccttccacttatgcatcgatcattaagacgattcaggatcgaggctacgtttattcgcgtggcaatgcgctggtgccgtcctgggtcgcgttcgccgtggtcggattgcttgaagccaacttcacctcgctggtggattacgatttcacctcctccatggaagatgagctggacaacatcgccgcaggtcgcgagggccgcacggagtggctcaacggtttctacttcggcgatgccgaagcggatcagtccatggctgaatcagttgcccgccagggcggtttgaaggcgcttgtcgacgcgaacctggagcacatcgacgcgcgttcagtaaactcactcaagcttttcgacgacgccgaaggccgtgccgtgaacgttcgagtcggacgctacggtccgtacatcgagcgcatcgtgggcaccaccgcggaaggcgagccagaatttcagcgcgccaacctacctgaggaaaccacgcctgatgagctgaccctcgaggtcgctgagaagctcttcgctaccccacaaggtggacgtgaactgggcattaacccagcaaacggtcgcatggtggtggctaaggaaggccgctttggtccatacgtgatcgagcaggtcacggactcagagcgcgctggcgccgaagcccaagcagaagaagtcgttgcagcggaacgaaaagctgaagacgaacaacgtgccaccgatggaatgcgacccaagaactgggaaaccaagactgccgcaaaccagaaggaaaagcgcatcaaccagctggttgaggaaaacctcaagccagcgaccgcatccctgttcagcggcatggaacctgcaaccgtgaccctggaagaagccctcaagctgctgtccctgccacgcgaagtaggtgtcgatccttccgacaacgaagtgatcaccgctcaaaacggacgatacggcccttatctgaagaagggtagcgactcccgttccctcaacagcgaagagcagatcttcaccgtcactttggatgaggctcgccgcatctacgccgaaccaaagcgtcgtggacgcgccgctgctcagccaccactgaagcaacttggcgacaatgacgtttccggcaaaccaatgaccgtcaaggacggacgtttcggcccatacgtcaccgacggcaccaccaacgcgtcactgcgcaagggcgatgttccagagtccctgaccgatgcgcgtgccaacgagttactttccgagcgtcgtgccaaggaagcagcagatggcggagctcctgcgaagaagacgtccactaaaaagactgcagccaagaagaccacggctaaaaagacaacagctaagaaaaccgtgaggaaggctccgccgaaaaccaccaaaaacgtggtgaaggccggcgctaagaagaagtcctaaaacatgctgaacgggttcgtgaccaaa

SEQ ID NO: 82 - protein, 996 aa, Corynebacterium glutamicum
VADTAGTTGSKKKYLVIVESATKAKKIQPYLGNDYIVEASVGHIRDLPRGAADIPAKYKKEPWARLGVDTDRGFAPLYVVSPDKKKKVADLKAKLKLVDELLLATDPDREGEAIAWHLLEVLKPTVPVRRMVFNEITKPAILAAAENTRELDENLVDAQETRRILDRLYGYEVSPVLWKKVMPRLSAGRVQSVATRVIVERERERMAFVSADYWDLSAEFNARENGKADSDNPSSFTARLSTIDGNRVAQGRDFNDRGELTSEAVVVDKQRAEALAEALEGQEMAVVGVEEKPYTRRPYAPFMTSTLQQESGRKLHYTSERTMRIAQRLYENGHITYMRTDSTSLSEQGMKAARDQALELYGAEYVSPSPRTYDRKVKNSQEAHEAIRPAGETFATPGQLHGQLDAEEFKLYELIWQRTVASQMADAKGTSMKVTIGGTAKTGEKTEFNATGRTLTFPGFLRAYVETTRTADGRDVADNAEKRLPLLSEGDLLKVLSIEADGHSTNPPARYTEASLVKKMEDLGIGRPSTYASIIKTIQDRGYVYSRGNALVPSWVAFAVVGLLEANFTSLVDYDFTSSMEDELDNIAAGREGRTEWLNGFYFGDAEADQSMAESVARQGGLKALVDANLEHIDARSVNSLKLFDDAEGRAVNVRVGRYGPYIERIVGTTAEGEPEFQRANLPEETTPDELTLEVAEKLFATPQGGRELGINPANGRMVVAKEGRFGPYVIEQVTDSERAGAEAQAEEVVAAERKAEDEQRATDGMRPKNWETKTAANQKEKRINQLVEENLKPATASLFSGMEPATVTLEEALKLLSLPREVGVDPSDNEVITAQNGRYGPYLKKGSDSRSLNSEEQIFTVTLDEARRIYAEPKRRGRAAAQPPLKQLGDNDVSGKPMTVKDGRFGPYVTDGTTNASLRKGDVPESLTDARANELLSERRAKEAADGGAPAKKTSTKKTAAKKTTAKKTTAKKTVRKAPPKTTKNVVKAGAKKKS

SEQ ID NO: 83 - DNA, 2917 bp, Corynebacterium glutamicum
  CDS (101)..(2887): RXA04194
cggatgctgaacccaagtggggaggcgtcgataagctataaacccgggcgcgccgacttcggtgacgtgctctagggcctagccaggtacccttagaggcatgagtttttctgccgaaaagggcacccacctttcagagttcatagcagacctgggctttgatctggacgagttccaaatcaaaggctgccacgctgtggaagaagaccacggtgttttagtatgtgcgcccaccggcgcgggcaaaacaattgttggtgaattcgcagtgtccctcgcattatcgcgggggacaaagtgtttctacaccacccccatcaaagcgctgagcaaccagaagtaccacgatttggtggctaaacacggctccgatgccgttggtctgctcaccggtgatgtttccattaaccatgatgctgacatcgtggtcatgaccaccgaagtgctgcgcaacatgatttacgcgggctcttttgcgcttgagcgcttaagccacgtggtcatggatgagatccacttccttgctgatgcctcccgtggcgcggtgtgggaagaagtgatcctcaacttggatgattccgtcaacatcatcggtctatctgccacggtgtccaactcagaggagtttggtgagtggctgaccactgttcgcggcgatacccgtgtgattgttactgatcaccgccccgttccgcttgatcagtacatgatggtgcagcgcaaagtgatgccactgtttgagcctggcaccgatggacgcgtgaacaaggagttagaggcaacgattgatcgcctcaacagcaagcaaagcgaacaaggccgtgcggcataccgctctggtgaaggcttccgtgcacgcagcaaaggcgataagcaggattctcgcactggtaagccacgggaacaagaccgccacaggccactgggtcggcctgaagtgctcagcatcctcaagggcatcaacatgctgccagcgattacgtttatcttctcccgcgcgggctgtgatggtgcgctgtaccaatgcttgcgttctaagttggtcttgacggatcaagcagaatcagaagagattgcacgcattgtcgacgccggcgtggtggggatccccgaggaagaccttcaagtactgaactttaagcagtggcgtgctgcactgatgcgcggtttcgcagcccaccacgcgggtatgcttccagcgtttaggcacatcgtggaagagctctttgttaaaggtcttgtccgcgcggtgtttgccacggaaaccctggcattgggaatcaacatgccagcgcgcaccgtggtgttggaaaagatggtcaaatttgacggcgaaggccacgttgatctcacccctggccaatacacgcagctgaccggtcgtgctggtcgacgtggcatcgatgtgttgggtaatgctgtggtgcagtggtcaccagcacttgatccacgatgggtggcaggtcttgcctctacgcgtacctacccgctgatctctacgttccagccgggctacaacatgtcggttaacctgctgaaaaccattggttatgagccttcgctgcgccttttggaaaaatcttttgcacagttccaagccgatggttccgtcgtgggcgatgtgcgtgaaattgaacgtgcagaagccaaggtggcagaattgcgtgcccagctgaacaaagagattgctgccaccaaccctgcggtgcgtgaagatcaagacgcagtggaggtgtttatcgactacatggagcttcgccgtgagctcaatgaggaagaaaaactcaatcgcaagcaaagcatcgaagatcgcaacgtagaaacagtccgtgtgctgtccaagctgcaaatcggtgatgtcattgccatgcctggtagaaaacgaccagttctcgcagtagtgatgacgcctgctaatcagagcagagatccccgcccatgggtgaccaccgaatctggttggtcaggtcgtgtggatgcggaatcctttactaatccgccgatcaccattgggcatatgcgtctgcctcgccaagctattgaagagcctcgccgcaatgcccggcgcgtccaggaactgtttaggcgtgagcacttcaagcgacccaacaagatgcgggagtttgctcgggttcgtcccaatgaggcagtgaccaaactgcgtaatgctattcgggatcatgaggcgcatcattggcctgatcgggagcacttggctcgcaccgcggagcgtatgatccgtaaagaacgtgatctggctaagttgaccggcaatgtggataaagccagggaaaccctcggtaggacgtttgagcgcattttgtcgctgctcagtgaaatggactatgtggattactctaatccagataatccagtgatcactgatgaaggtgagcgtttggcgaaaatccacagtgaggcagacctgttggttgctcagtgcctcaagcgtggcatttgggacaaccttgatcccgcagagctcgccggtgtggtgagtatgtgcacgtttgaaaatcgtcgcgaaaccggtggtgaggctcaagctgtcacagaggccatggctgattccatgaatagcgtggaacgtatttggggtgagctggttgaagatgagcgccgtcaccgtctgccaattactcgccagccggaagcaggttttgccaccgcgatccaccagtgggcttcaggtgctccgctgggatattgcatggctgcggcagcggaaaacggcgcggagttgacccctggtgacttcgtgcgctggtgccgtcaagtcatcgatcttctagagcaggttgctaagactgcctactttgatgagaccacacggaatgctcgtcaggctattgatgcgattaggcgtggagttgtggcgatcggttcctagcgagctagctatgttcgagcagttcaa

SEQ ID NO: 84 - protein, 929 aa, Corynebacterium glutamicum
MSFSAEKGTHLSEFIADLGFDLDEFQIKGCHAVEEDHGVLVCAPTGAGKTIVGEFAVSLALSRGTKCFYTTPIKALSNQKYHDLVAKHGSDAVGLLTGDVSINHDADIVVMTTEVLRNMIYAGSFALERLSHVVMDEIHFLADASRGAVWEEVILNLDDSVNIIGLSATVSNSEEFGEWLTTVRGDTRVIVTDHRPVPLDQYMMVQRKVMPLFEPGTDGRVNKELEATIDRLNSKQSEQGRAAYRSGEGFRARSKGDKQDSRTGKPREQDRHRPLGRPEVLSILKGINMLPAITFIFSRAGCDGALYQCLRSKLVLTDQAESEEIARIVDAGVVGIPEEDLQVLNFKQWRAALMRGFAAHHAGMLPAFRHIVEELFVKGLVRAVFATETLALGINMPARTVVLEKMVKFDGEGHVDLTPGQYTQLTGRAGRRGIDVLGNAVVQWSPALDPRWVAGLASTRTYPLISTFQPGYNMSVNLLKTIGYEPSLRLLEKSFAQFQADGSVVGDVREIERAEAKVAELRAQLNKEIAATNPAVREDQDAVEVFIDYMELRRELNEEEKLNRKQSIEDRNVETVRVLSKLQIGDVIAMPGRKRPVLAVVMTPANQSRDPRPWVTTESGWSGRVDAESFTNPPITIGHMRLPRQAIEEPRRNARRVQELFRREHFKRPNKMREFARVRPNEAVTKLRNAIRDHEAHHWPDREHLARTAERMIRKERDLAKLTGNVDKARETLGRTFERILSLLSEMDYVDYSNPDNPVITDEGERLAKIHSEADLLVAQCLKRGIWDNLDPAELAGVVSMCTFENRRETGGEAQAVTEAMADSMNSVERIWGELVEDERRHRLPITRQPEAGFATAIHQWASGAPLGYCMAAAAENGAELTPGDFVRWCRQVIDLLEQVAKTAYFDETTRNARQAIDAIRRGVVAIGS

SEQ ID NO: 85 - DNA, 2325 bp, Corynebacterium glutamicum
  CDS (1)..(2325): RXA07017
gtggctttgtatagcaagtatcgaccggcaagttttggtgaactagttgggcagtcgcaagtgactgaccctctgtccgcagctttggatagcgggcgcatcaaccatgcgtaccttttttcgggtccgcgtggttgtggcaagacgtcgtcggcacgcatccttgcccggtccctcaactgcgtggaaggcccaacttccacgccgtgtggggtgtgtaattcttgcgtagcgctggccccgggtggccctggaacccttgatgtaacagagctcgacgccgcgagtaacaatggtgtcgatgacatgcgtgaactgcgcgaacgcgcgaactacgccccggcggaatctcgctaccgcgtgttcatcattgacgaagcccacatgatcagtacccaaggcttcaacgccttgctgaaaatcgttgaagagccaccagcgcacctgattttcatcttcgccaccaccgagccggacaaaatgatcggtacgatccgttcccgcacgcacaattacccattccgcctgctcaccccaggggatatgcgcaaagtgctgaaaaatgcggtcgatggcgaaggcgtccacgtcgacgattccgtttacccactggtcatccgcgccggcggcggcagcccccgcgacagcctctccatcctcgaccagctcatcgccggctcgggcccggagggcttgacatatgagcgcgccttgccgctgctcggtgtcacaagcttcacgcttatcgacgattcgatccatgcccttgcatctaaagacaacgcaagcatgttcaccacgatcgataacgtcatcgaagaaggcctcgaaccgcgacgcttcacgatcgacctcctcgaccgcctccgcgacttgatggtcctccaagccgtcccagaagcactaaacctcgggcttgtcgacgcccccaccgaccgcgccgacgccctaatcgaacaatccaccctgttcaaaggcaacgagctcgccaacctagcctccatggtgaactccggactcgacgacatgcgtggtgccacctcaccgcgcctccttctggaaatcctctgcgcccgactgctcctggcaagcaataccgtggcaggtccagcggtcagtagttcgactgacgctgcgcctgcagctactccgggtggtctcactggtattgctgctgcccgcgcgaaagcacgggagtatggacagaagaaggcagctccagctcctgcaccaactcctgcgcccgagccagtgcgcgaacagtctcttgcaccaacgcctgaaccaacgccagcggctgaacctacatctcagcccgcgccggaaccggaacccgccagggaaccagtggtggaagtgcgggaggcgagcgtcgaaaagcagcctgcaagcagtgatcccctcgaaaccattcgaagccgctggtcagagctgcgcaacatcgtggaaaaacaaagtgtgcgcacctcaatcatgctgaccgaagcgcgagttttgggactgcgaggcgataccctcgtgctcggtcacagcaccggggcgttggctgcgcgtttgaacgctgctgatcacaacggaattttggtcaaggtgttggctgaggaaactggtctgcagctcaaggtcgaatgcattgtgggcacgaacccagccgaagctggatttaccgcccagcctgctgtgcaaaagagcacgtggaaccccaactacgactccaaaccagccactccaagtgcgcctgcgcagcctcagacgcctaagcaagaatccgtgcccaccgagccagaggagcctgagagttcggctgaaacttcgggatgggggcaaccggtaaaaatcggtgggccagcacctgaggcacagactccaacgcctccgcctgctccggtggttccggctactcctgctgctccggctgcgggtgctgcgaaaccagcgtggaaggaacgcgtcgaacaagccgcggcaaatgcagcgcaacaacgtcagcatcgccagggcagctccgagcccttcgagcggggtgttccgctgccaccagaacctgacctgccaccggacccctatggatacccagctgacgagggtttccccgaacgaaaccaagggttccagcaacagccagcgcctcccgttgagcaaccagctcctgagcctgcgacggagccagttccagcagttgcgcctgagccggaggtcagccagctatctgaagaagagcagctgatccgcgaagcagacgaagagccaggtgaaatggatcgtcgtgatgcgaaaaccatcgcgatggaactgcttgctcaggaactcggcgcgaaacctttg

SEQ ID NO: 86 - protein, 775 aa, Corynebacterium glutamicum
VALYSKYRPASFGELVGQSQVTDPLSAALDSGRINHAYLFSGPRGCGKTSSARILARSLNCVEGPTSTPCGVCNSCVALAPGGPGTLDVTELDAASNNGVDDMRELRERANYAPAESRYRVFIIDEAHMISTQGFNALLKIVEEPPAHLIFIFATTEPDKMIGTIRSRTHNYPFRLLTPGDMRKVLKNAVDGEGVHVDDSVYPLVIRAGGGSPRDSLSILDQLIAGSGPEGLTYERALPLLGVTSFTLIDDSIHALASKDNASMFTTIDNVIEEGLEPRRFTIDLLDRLRDLMVLQAVPEALNLGLVDAPTDRADALIEQSTLFKGNELANLASMVNSGLDDMRGATSPRLLLEILCARLLLASNTVAGPAVSSSTDAAPAATPGGLTGIAAARAKAREYGQKKAAPAPAPTPAPEPVREQSLAPTPEPTPAAEPTSQPAPEPEPAREPVVEVREASVEKQPASSDPLETIRSRWSELRNIVEKQSVRTSIMLTEARVLGLRGDTLVLGHSTGALAARLNAADHNGILVKVLAEETGLQLKVECIVGTNPAEAGFTAQPAVQKSTWNPNYDSKPATPSAPAQPQTPKQESVPTEPEEPESSAETSGWGQPVKIGGPAPEAQTPTPPPAPVVPATPAAPAAGAAKPAWKERVEQAAANAAQQRQHRQGSSEPFERGVPLPPEPDLPPDPYGYPADEGFPERNQGFQQQPAPPVEQPAPEPATEPVPAVAPEPEVSQLSEEEQLIREADEEPGEMDRRDAKTIAMELLAQELGAKPL

SEQ ID NO: 87 - DNA, 4026 bp, Corynebacterium glutamicum
  CDS (1)..(4026): RXA07018
atgttctggggggaaagggagttttacgtgctcgacgtaaacgtcttcgatgagctccgcatcggcctggccaccgccgacgacatccgccgttggtccaagggtgaggtcaagaagccggagaccatcaactaccgaaccctcaagcctgagaaggacggtctgttctgcgagcgtatcttcggtccaactcgcgactgggagtgcgcctgcggtaagtacaagcgtgtccgctacaagggcatcatctgtgaacgctgtggcgttgaggtcaccaagtccaaggtgcgccgtgagcgcatgggacacattgagctcgctgcaccagtaacccacatttggtacttcaagggcgttccatcacgcctcggctaccttttggaccttgctccaaaggacctggacctcatcatctacttcggtgcgaacatcatcaccagcgtggacgaagaggctcgccacagcgaccagaccactcttgaggcagaaatgcttctggagaagaaggacgttgaggcagacgcagagtctgacattgctgagcgtgctgaaaagctcgaagaggatcttgctgaacttgaggcagctggcgctaaggccgacgctcgccgcaaggttcaggctgctgccgataaggaaatgcagcacatccgtgagcgtgcacagcgcgaaatcgatcgtctcgatgaggtctggcagaccttcatcaagcttgctccaaagcagatgatccgcgatgagaagctctacgatgaactgatcgaccgctacgaggattacttcaccggtggtatgggtgcagagtccattgaggctttgatccagaacttcgaccttgatgctgaggctgaagagctgcgcgacatcatcaacaatggcaagggccagaagaagatgcgtgcactgaagcgcctgaaggttgttgcagccttccagcgttccggcaacgatcctgccggcatggttttgaacgcgatcccagtgatcccaccagagcttcgcccaatggttcagcttgacggtggtcgcttcgctacctccgacttgaacgacctttaccgtcgtgtgatcaaccgcaacaaccgtctgaagcgcatgattgagctcggtgcacctgagatcatcgtgaacaacgagaagcgcatgctgcaggaatctgtggacgcgctgttcgacaacggtcgtcgtggtcgcccagttaccggaccgggtaaccgtccgctgaagtctctgtctgacttgctcaagggcaagcaaggccgtttccgtcagaaccttctgggtaagcgtgttgactactctggtcgttccgtaattatcgttggtcctcagctgcgcctccacgaatgtggtctgcctaagctgatggctctcgagctcttcaagcctttcgtcatgaagcgcttggtggagaacgagtacgcacagaacatcaagtctgcaaagcgcatggttgagcgtcagcgccctgaggtgtgggacgtcctcgaagaggccatctctgagcacccagtgatgctgaaccgtgcaccaaccctgcaccgcttgggcattcaggctttcgagcctgtccttgttgagggtaaggctattcagctgcacccacttgcttgtgaagctttcaacgccgacttcgatggtgaccagatggcagttcacctgccgctgtccgctgaagctcaggctgaggctcgcgtgctgatgcttgcatccaacaacattttgtccccagcttccggtaagcctttggctatgcctcgtctggatatggtgaccggtctgtactacctgactctggagaagtcttccgaggagttcggtggacagggcgcttaccagcctgcagatgaaaacggtcctgaaaagggcgtgtattcctcactggcagaagcaatcatggcttatgaccgtggtgtacttggcctgcaggccccagttcgcatccgtttgaaccacctgcgcccaccagctgaggtagaagcagagcagttcccagatggatggaaccagggcgagacttggttggctcacaccaccttgggtcgcgttatgttcaacgagatcctgccttggaactacccataccttgagggcgttatggtccgtaagggtggcggctccgacaagatcatgcttggcgacgtagtcaatgacctcgctgctaagtacccaatgatcaccgtggctcagaccatggacaagatgaaggatgctggcttctactggtcaacccgttccggtgtgaccatcgctatgtctgacgttttggttcttcctaacaaggaagaaatgctggaccgctacgaggaatctgcacgccagatcgaagttaagtacaaccgcggtaagctcaccggccgtgagcgctacgaccgtctggtcgagctgtggaaggacgcaactgacgaggttggacaggctgtcgaggatctgtacccagacgacaacccaattccaatgatcgtgaagtctggtgctgccggtaacatgcgtcagatctggacccttgctggtatgaagggcatggttgtgaactcgaagggtgactacatcacccgcccgatcaagacttccttccgtgaaggcttgaccgttctcgagtacttcaacaactcccacggttcccgtaagggcctggccgataccgcgctgcgtaccgctgactccggttacctgacccgtcgtcttgttgacgtcgctcaggacgtcatcgtgcgtgttgaggactgtggcacccgccagggtgttcgcgttcctgtcgctgctgaggttctggatgcaactggtgctgtcaccggctacacccgccatgacctgatcgagacttctgtctccggtcgtgttctggctggcgatgcaaccaacgctgcaggcgaggttgtgcttgctgctggtaccgacctgaccgagctcaacattgaccttctggtcgaggctggcatcaaggacgtcaaggttcgttccgtacttacctgccagaccccaaccggtgtttgtgctaagtgctacggcaagtccatggcttccggccagcaggttgatatcggagaggctgtcggtattgttgctgcacagtccattggtgagcctggtacccagctgaccatgcgtaccttccaccagggtggtgtcggtggcgatattaccggcggtctgcctcgtgttcaggagctgtttgaggcacgtgttcctaagaactgtgcaccaattgcttctgttgaaggtgttatccaccttgaggatgaaggcaacttctacactctgaccatcgttcctgacgatggctccgacaacgttgtctacgagaagctgtccaagcgacagggtcttgcatccactcgcgtggctatggagtccaacgctggtgcgttcattgagcgcaccttgaccgaaggtgaccgcgtcaccgttggtcagcgtctgctccgtggtgcagctgatccacacgacgtgctcgagatcctcggtcgccgtggtgtggagcagcacctcatcgatgaggtgcaggctgtttaccgtgcacagggtgtggccatccacgacaagcacatcgaaatcatcattcgtcagatgctgcgtcgcggtaccgtcattgagtccggttccaccgagttccttcctggttctttggttgacctctctgaggcgaagctggctaactctgaggcaatcggtgcgggcggtcagcctgcagagctgcgttctgagatcatgggtatcaccaaggcctctctcgcaactgagtcttggctgtctgcagcgtccttccaggagaccactcgtgtcctgactgatgctgctatcaacaagcgctccgataagctcatcggcctgaaggagaacgtgatcatcggtaagctgatcccagctggtactggtatttcccgttaccgcaacatctccatcaagccaaccgaggctgctcgcaacgccgcatactcgatcccaacttatggtgagtcgatttacggtgacgatggattcggtgagttcaccggcgcatccgtcccattggatgaggctttc

SEQ ID NO: 88 - protein, 1342 aa, Corynebacterium glutamicum
MFWGEREFYVLDVNVFDELRIGLATADDIRRWSKGEVKKPETINYRTLKPEKDGLFCERIFGPTRDWECACGKYKRVRYKGIICERCGVEVTKSKVRRERMGHIELAAPVTHIWYFKGVPSRLGYLLDLAPKDLDLIIYFGANIITSVDEEARHSDQTTLEAEMLLEKKDVEADAESDIAERAEKLEEDLAELEAAGAKADARRKVQAAADKEMQHIRERAQREIDRLDEVWQTFIKLAPKQMIRDEKLYDELIDRYEDYFTGGMGAESIEALIQNFDLDAEAEELRDIINNGKGQKKMRALKRLKVVAAFQRSGNDPAGMVLNAIPVIPPELRPMVQLDGGRFATSDLNDLYRRVINRNNRLKRMIELGAPEIIVNNEKRMLQESVDALFDNGRRGRPVTGPGNRPLKSLSDLLKGKQGRFRQNLLGKRVDYSGRSVIIVGPQLRLHECGLPKLMALELFKPFVMKRLVENEYAQNIKSAKRMVERQRPEVWDVLEEAISEHPVMLNRAPTLHRLGIQAFEPVLVEGKAIQLHPLACEAFNADFDGDQMAVHLPLSAEAQAEARVLMLASNNILSPASGKPLAMPRLDMVTGLYYLTLEKSSEEFGGQGAYQPADENGPEKGVYSSLAEAIMAYDRGVLGLQAPVRIRLNHLRPPAEVEAEQFPDGWNQGETWLAHTTLGRVMFNEILPWNYPYLEGVMVRKGGGSDKIMLGDVVNDLAAKYPMITVAQTMDKMKDAGFYWSTRSGVTIAMSDVLVLPNKEEMLDRYEESARQIEVKYNRGKLTGRERYDRLVELWKDATDEVGQAVEDLYPDDNPIPMIVKSGAAGNMRQIWTLAGMKGMVVNSKGDYITRPIKTSFREGLTVLEYFNNSHGSRKGLADTALRTADSGYLTRRLVDVAQDVIVRVEDCGTRQGVRVPVAAEVLDATGAVTGYTRHDLIETSVSGRVLAGDATNAAGEVVLAAGTDLTELNIDLLVEAGIKDVKVRSVLTCQTPTGVCAKCYGKSMASGQQVDIGEAVGIVAAQSIGEPGTQLTMRTFHQGGVGGDITGGLPRVQELFEARVPKNCAPIASVEGVIHLEDEGNFYTLTIVPDDGSDNVVYEKLSKRQGLASTRVAMESNAGAFIERTLTEGDRVTVGQRLLRGAADPHDVLEILGRRGVEQHLIDEVQAVYRAQGVAIHDKHIEIIIRQMLRRGTVIESGSTEFLPGSLVDLSEAKLANSEAIGAGGQPAELRSEIMGITKASLATESWLSAASFQETTRVLTDAAINKRSDKLIGLKENVIIGKLIPAGTGISRYRNISIKPTEAARNAAYSIPTYGESIYGDDGFGEFTGASVPLDEAF

SEQ ID NO: 89 - DNA, 840 bp, Corynebacterium glutamicum
  CDS (1)..(840): RXA07019
atggctattcgtaagtacaagccgacaaccccgggtcgccgcgcaagctccgtttccatgttcacggagatcacccgttcgacccctgagaagtcacttctccgcccactgagcaagaccggcggacgtaactctcacggccacatcaccacccgtcaccgcggtggtggacacaagcgccgctaccgcgtcatcgacttccgtcgtaacgacaaggatggcgtattggcgaaggtcgctcacatcgagtacgacccaaaccgtaccgctaacattgcactgcttcactacttcgatggcgagaagcgttacatcctcgcaccgaagggcctgacccagggcaccgttatcgagtccggcgctgcagccgacatcaaggttggtaacaacctgccactgcgtaacatcccgactggtaccaccatccacaacgtggagttgaagccaggcgcaggtgcaaagctggcacgttccgctggagcttccatccagcttcttggtaaggaaggctcctacgcagttctgcgtatgccatcctccgagatccgacgcgtagacatccgctgccgcgcgactgttggtgaggtcggcaacgccgagcagatcaacattcgttggggtaaagctggtcgtatgcgttggaagggctggcgcccaaccgtccgtggtgtcgttatgaacccggtcgaccacccacacggtggtggtgaaggtaagacttctggtggtcgccacccagtctccccatggggacagaaggaaggccgcacccgcaagcctaagcgttacagcgatgacatgatcgttcgtcgccgtcgtgctaacaagaacaagaagcgc

SEQ ID NO: 90 - protein, 280 aa, Corynebacterium glutamicum
MAIRKYKPTTPGRRASSVSMFTEITRSTPEKSLLRPLSKTGGRNSHGHITTRHRGGGHKRRYRVIDFRRNDKDGVLAKVAHIEYDPNRTANIALLHYFDGEKRYILAPKGLTQGTVIESGAAADIKVGNNLPLRNIPTGTTIHNVELKPGAGAKLARSAGASIQLLGKEGSYAVLRMPSSEIRRVDIRCRATVGEVGNAEQINIRWGKAGRMRWKGWRPTVRGVVMNPVDHPHGGGEGKTSGGRHPVSPWGQKEGRTRKPKRYSDDMIVRRRRANKNKKR

SEQ ID NO: 91 - DNA, 1089 bp, Corynebacterium glutamicum
  CDS (1)..(1089): RXA07020
atggcggggttagttgacttaacaataaacatgagggaagggctggactacacggtgtccgaaattcagttgaccgaagccagtttgaacgaggcggccgacgccgcgatcaaggctttcgacggtgcacaaaacctagatgaactcgcagcactacgccgcgatcacttgggtgatgccgcacctattccgcaggcacgacgctcattgggaactattcctaaagatcagcgcaaggatgcgggccgctttgtcaacatggcacttggtcgcgcagaaaagcactttgctcaggtcaaggttgttttggaagaaaagcgcaacgcagaagtcctagagcttgagcgcgttgacgtcaccgttccaaccacccgcgagcaggttggtgcgctgcaccccatcacgatcctcaacgagcagatcgcagacatcttcgtgggcatgggctgggaaatcgccgagggcccagaggtggaagcagaatacttcaacttcgacgcactgaacttcctgcctgatcacccagctcgtacactgcaggacaccttccacattgcgccggaaggctcccgccaggtgctgcgtacccacacctcaccagttcaggtgcgcaccatgctcaaccgtgaagttccgatctacatcgcatgccctggccgtgtgttccgtaccgacgaactcgatgcaacacacacccctgtgttccaccagatcgaaggccttgcagttgataagggtctgactatggctcacctgcgcggcaccttggatcacctggccaaggaactcttcggcccagagaccaagactcgtatgcgctccaactacttcccattcaccgagccttccgctgaggttgatgtgtggttccctaacaagaagggtggtgcaggctggatcgagtggggtggctgtggcatggtcaacccaaacgtgcttcgtgccgtgggtgttgacccagaggagtacaccggattcgcgttcggcatgggcattgaacgtaccctgcagttccgcaacggcctgagcgatatgcgcgacatggttgagggcgatattcgcttcaccctcccattcggcattcaggca

SEQ ID NO: 92 - protein, 363 aa, Corynebacterium glutamicum
MAGLVDLTINMREGLDYTVSEIQLTEASLNEAADAAIKAFDGAQNLDELAALRRDHLGDAAPIPQARRSLGTIPKDQRKDAGRFVNMALGRAEKHFAQVKVVLEEKRNAEVLELERVDVTVPTTREQVGALHPITILNEQIADIFVGMGWEIAEGPEVEAEYFNFDALNFLPDHPARTLQDTFHIAPEGSRQVLRTHTSPVQVRTMLNREVPIYIACPGRVFRTDELDATHTPVFHQIEGLAVDKGLTMAHLRGTLDHLAKELFGPETKTRMRSNYFPFTEPSAEVDVWFPNKKGGAGWIEWGGCGMVNPNVLRAVGVDPEEYTGFAFGMGIERTLQFRNGLSDMRDMVEGDIRFTLPFGIQA

SEQ ID NO: 93 - DNA, 1857 bp, Corynebacterium glutamicum
  CDS (1)..(1857): RXA07027
atggcatttttacactttggctcagaactgaaacgatttggccgcggaaaactcccaccattggggtttgttgtggtcatgttgctgccgttgcttttcggcggcgtctttgtttctgcctactatgaccccatcggtggcttgtccaagcttcccgtggccgtggtcaatcaggacgaaggtgaactcgatgccggcgcccaggtggtggagaacctcctggagcaagacgacatcaaattcattgaagtcagcgccgaggaagcccgcgagggaatcaacgacggcacctactacttcggcattgaaattccgaagaacttcagcgattctattgccagcgtgaccagcgattcacccgcgccagcaaccgtcaacgcggtattcaacaacagcaacggcttcattgcctccatgctgggcaaccaggtggtcaacactgttgtggagaccatggacacggaattcggcgtccgcattgtggataacatgctcgtcggtttctccaccttgggcgacggcatgaaccaagccgccgaaggtgccactacgctcagcgatggcgtcggttccgccaacgacggtgcagttcagcttgccgacggcgcggtcaccctgcgcgacggcatcgcaagtgccaatgagggtgcgcaatcgcttgccgacggcgccagccagctcgacaccggcctcggctccgcggctacaggcagccaaacgctcgccgacggtctatccagcctgtctgcgggcaccgcccaactaggccaaggcgcaacccaggtttcagatggcgtgggccaacttgtcgaccaagtagcaccactgaccgcctatgttccagacatcaactctcagttgatcaccctgcgcgacggcgcagccaccattgcctctgaactatctgatccctccagcacctaccgctccggcgtggactccgctgtgagcgcatcccagcaactagcagccggcctgcaaaccctgaaagacggatccagccaactcagcatcggtgcacgcaccctcgctgatggcaccagccaattggccgcaggttccgaacagctagttgttggcgcacaagcactgcgcgacggcaccgtccagcttgatgaaggctccagcgaactcgccctcaaactcaccgacggcgcaagccaagtaccaaccttcgctgacggcgcagacaccaccatcgcaaccccagttgaaacagaacaagcaggagacaccacaccgctcttcggtattggtctcgcaccattcttcatggctgtcggcctgttcatgggagcaaccgttgcctggatgatcctgcacccaatcagtcgccgcgcactcgactcccgcatgggaggcttccgaggcaccctggcaagctaccttccatcaacagtcttaggccttggccaagcaaccatcatgtgggcagtactgtacttcctgctcgacctcaatccagctcacccagctggactgtggatggcgatggtcgccatctcatgggtattcatctccattacccatatgttcaacaacgtggcaggaccctccgcaggccgtgtgctgtccatcgtgatgatgtccttccagctagtctcctccggtggcctatacccaccagaaacccagccagcattcttccactggttccacacctacgacccgatcacctacgcagtcaacctcgtgcgccaaatgatcttcaacgaaaccccatccaacgacccacgcttcatacaagcaatctgggtactgctcttcatctgggcactgatgctcgccatctccaccctggcgaatagaacaaacaaggttcttcgcatgaaggactaccacccagaactgaaggtc

SEQ ID NO: 94 - protein, 619 aa, Corynebacterium glutamicum
MAFLHFGSELKRFGRGKLPPLGFVVVMLLPLLFGGVFVSAYYDPIGGLSKLPVAVVNQDEGELDAGAQVVENLLEQDDIKFIEVSAEEAREGINDGTYYFGIEIPKNFSDSIASVTSDSPAPATVNAVFNNSNGFIASMLGNQVVNTVVETMDTEFGVRIVDNMLVGFSTLGDGMNQAAEGATTLSDGVGSANDGAVQLADGAVTLRDGIASANEGAQSLADGASQLDTGLGSAATGSQTLADGLSSLSAGTAQLGQGATQVSDGVGQLVDQVAPLTAYVPDINSQLITLRDGAATIASELSDPSSTYRSGVDSAVSASQQLAAGLQTLKDGSSQLSIGARTLADGTSQLAAGSEQLVVGAQALRDGTVQLDEGSSELALKLTDGASQVPTFADGADTTIATPVETEQAGDTTPLFGIGLAPFFMAVGLFMGATVAWMILHPISRRALDSRMGGFRGTLASYLPSTVLGLGQATIMWAVLYFLLDLNPAHPAGLWMAMVAISWVFISITHMFNNVAGPSAGRVLSIVMMSFQLVSSGGLYPPETQPAFFHWFHTYDPITYAVNLVRQMIFNETPSNDPRFIQAIWVLLFIWALMLAISTLANRTNKVLRMKDYHPELKV

SEQ ID NO: 95 - DNA, 1074 bp, Corynebacterium glutamicum
  CDS (1)..(1074): RXA07028
atgaagcccaccgttaatgttgtgttcaatgcgcatcaccccaaagatacgcagccgttggataagttcttcgataaagaacttaaagacacacatcatctcgatataacggtgggttatatcagtgagaaatcactacaatatttgcttcttattgcaggcactcaccccgacctcaccatcacactcacctgtggaatgcacgctcgtgaaggcatgactgctgcccaactgcatcatgcgcgagtgctccatgactacttaagcgaccatgatcgaggcggggtgttcgttattccccgattgcgttatcacggcaaaatctatcttttccacaagaaccagcacacagatcctattgcttatatcggtagcgctaacctctcagccatcgttcctgggtacacctctacattcgagaccggcgtcatcttagaccccgcacctgaagatctcgtgcttcatctcaaccgtgatgtcgtacccctatgtgtccccattgacaccgcgcatgtccccatcattaaagatcaagaatccccgatgaagcacgtcgctgaagcaacagctgtgtccacctctgatgttgttgccatcatgtccagcccatttacttatagttttgaccttaaactcaaagccactgccagcagcaacctcaatgctcataactcaggcggtggcgcgcgcaaacagaaaaacggtagcttccttgcacgcaattggtatgagggcgaaatcattgtcggtgtcgagacaacaagactcccaggttacccacaaaacaaatccgaattcactgcggtcactgatgacggctggtcatttgtttgcaaaatcagcggaggaaacggaaagaacctacgcagcaaaggtgacctgtccatcctcggtacgtggttaaagtctcgattcattgaacaaggtgccctggaatacggcgaggatgccacccaagaaaacatcgaccgttttgggagaacacatatgaccatgcgctatcacccagatttcgatgtgtggtcattcgatctcagccaaaccccgaagccttcgacacagattgggcaggat

SEQ ID NO: 96 - protein, 358 aa, Corynebacterium glutamicum
MKPTVNVVFNAHHPKDTQPLDKFFDKELKDTHHLDITVGYISEKSLQYLLLIAGTHPDLTITLTCGMHAREGMTAAQLHHARVLHDYLSDHDRGGVFVIPRLRYHGKIYLFHKNQHTDPIAYIGSANLSAIVPGYTSTFETGVILDPAPEDLVLHLNRDVVPLCVPIDTAHVPIIKDQESPMKHVAEATAVSTSDVVAIMSSPFTYSFDLKLKATASSNLNAHNSGGGARKQKNGSFLARNWYEGEIIVGVETTRLPGYPQNKSEFTAVTDDGWSFVCKISGGNGKNLRSKGDLSILGTWLKSRFIEQGALEYGEDATQENIDRFGRTHMTMRYHPDFDVWSFDLSQTPKPSTQIGQD
